United States Patent Application Publication US 2006/0134663 A1 - sequence listing, part 33

SEQ ID NO: 58517 - DNA, 154394 bp, Homo Sapiens
gatcaaagggtcctccctggccacttccacctacaggaggtcaaaaatggagagagggaaaacaggttgatatcctgaaccttatggggctgggcttcatccattcctttcatgaatatgcacagacacatgtgcaaacacacacatacactgagctgtaccatgagcaaggcactgtgccgagtgtcaacaattttaaaagatttcacccagctcctgcctttgaggagtgcatggtccagaggaggaagcacgtgatagcagtgtagtgtgaatggtgctggaataggctgatggaacctcatgaatgcacggagaacagaggcctggtgccacccagtgtggacgagaggatggcatagcaggactaagaggtagccaggagccagctcatgaaaggccttatatgctgagccaatgctattgagattggactttgtcttaagagcaatggggagcaactgagcagttttgagcaggacagtggaattatagaatttattctttgaaaatattcctctggcttccgtgtggaggaaggattagaggtgggtggccagtgagggctttgcagttatccagcttagcaggatggagcactgccaacccaaccagagcaaatggggaggccaccagcctcaccctgaccctggacatgcccaccatgatgggaagacacagactgttccacaacaaccccttggaccccagcccagccctggaagaaccatgtaccttgactggcagggaagcctccactccgggcctgggcacacatgggagggtagggccccatgcttggtatgggctcaggctagcgctgctgccctggagtcagagctgtgtagagaggggcaagccccactcccagagagaaggagccacatgccgtgatggcaggtggtcggtgcagaccctcagctgttgggggagtggtcgggatgcctgaaatgtctgggaccgaggttctgggtgcagcctggagagttggggctgtgcgttcttgttgccattgttacattggctcatattgctgagtccttattcattaggctgttgggtacttttagacacacacacacaccagtctggagcacagagaaaactgtcataggcactcaaaattagagcaagttagataaaggggccagtaagtacagacctcacatgcccccagtggtggattcaggggtcactgattctatccattcctacagatgaacaggataaatatacctccgaccccgtccagtttttctatcccatttaatcactcctcagctgagaaagccagaaactcattcctgacgtggctgacaaatgctggggaaatctttggttttcttagagtgagcctctctttgtaaccagagagcaagagaaggaacagggccttaaaatcacttcaagtggcctgtgcctgatcctgaggtccagagaaggagaatgacttattcaagatcacagtttaatcatacatgcctttatccattcactcagcaaacacagttcaaacacctaccacttgccaaaccttctagatagttattaccaacataaccaagcaaagtatatggaatgccagatggcaatgggtacaggagagaaaaataaattggacaaggggatagacagtgctttggaggtagaggcagctttaagtagggtcacactagagtgaagatcgcaaggaggtgaagcttattctgggggaagaatattctaggaaaaggggacagtgagtgcagagtccctaagacaaggcatgctggggcgccggaagaaaagcagaggatggtgtagctggagaggaggtagccaggaggtgagttgtaggagattaagtcagagatgtgcgaggtatgagggagaagttcttttgtagagacttcaccttgactctagtcggatgggagcccatgtgggctctgagcagaaaaggaacagctctgacttaggatttagttggctgctgtgctgtggatagacagacagttggcaagcctgaagtcaaagagtccatgtaggagatccaggcaagaaataatggttgcttgaaccaaggaggcagtagtggaggtgggaagaggaaatcacacagagtctggccagattatggaggtaaaggcaacagtattgactaaaggaccaaatgcaagatgtgagaagaacagagtcagaatgaccccaaggtttttgtcccatgctgctagaaggaagacgtttcccattagccatgttggaggataccacaggagaatgggtctctgtttgagcatcttattcaagatgccattcaacatctagtgaaggtggacaggagacagtggacacaagtcaggacctcagggaccaggtcacaggcagagctagaccttgaacttcaagattcacagatcacactgcttctgactgaggagtgacagaagtgccagagcaatctcaccagctctggaatgttcatcacttgacggctgggctggcaatgaagaagctccatgcagtctttgggacaacactgcaccaagagaccacagcaacaggggagctcgcagagtagaacactggcattcaacccaaagcctcactgtttccagatacaagtgaaggtaaattccctgcccctccccctgccccaccacattcatccatccttgaagaactcctgggagctcactgggaaactcactgagcagtgagtaatatggttttgcttaagccttgctcaagtagcagaataagcaagtttgactaaaattctctagattcacaaatcccaaagccctaaactacagaaaacagactagtcaagagagaggaagctgtctgctggctatttgtggagcatcacccaatcaatgaacaagtatgcatagactgctgggtgcagagggaggggtgtttaagggatgtcttaatcgggttttccagaagcagatcctgagacaaggatttggttgcaagtagttatttagaaagtgaacccaggaagcaccagtaggagaatgaggaagcaagacaggtaatgaatgtattagtgaactgatcaccactgtgagcaattaggctcaattctactctaggaggctgtacagaatgtatctcagggttgtcccaccaaggggcaaggaaactgaggtacttatccactaactctcttttgttgttgagtgttcttcccacaaaccttaacttccaggcacttccagtttgtccctttattaagctgaccaatctcctgaggccagagaaagccttccagcagagaccagcaggtgtttccagtaggacactgtctgtgtgtactgaaaccagagtgtcatagggaattagaaggacgcagcaccaaccataatgggtttcacaggaactgcctggtctccacaaatagggactctaattttggtctggattctaagaaccaccttcaccccagtaaataggactgagatgacttttatcattcctgtaagcagagatagaaatgccagagcaaagtctcattggtccacacagaaagaaggaagcctcggtgctctttaattggagaccagagctgtggcaattcccaaccagtgtcagaattttgcaatgtgttggagacaggcagccctccctaggaatctactgagagacccagatctttgggcccttagtgagtgtttgagtaaataggtaagcagtggctgcggctcaggcaggagggtcctggaagttaatgtcccagcacagagcttcagcccagaccacagtgccaacatcctagcccttctggttaataattatccctaattccttagcgtgggaggcctggagatgaaaatcacaactctccatgtcctcatcagtctgttgtatgtgcatgtgtaccagatacctacatgcaacctcatgaaattccagacattctcatcaacaaatccctttgtcatcttcataaaatccaaagttaaagggcccaccctaagaattgtgactcatagattcctggatggatcaactctatgtgactattagagctagttttctcatgcccatattgggcaaaacctggtaaacagcacccctgtctctccctccccaaaattctgtctggatgagcagtcccttatgtaacaagctaaaacctttacaactgaccatatgtcaggaaacagtaaggtgtttacaagatacatgagaggggagtccctgtctttcaagagctcctgagtcctgccaatgaacaccttaagtacctgccctttaggggatacttgctgaaatcattccttgaatagaatgttagaatggcagaatgacagtggctgccaccgataggtcagagcattaaggactgggtcttttgaccgaccctaggatctctcttcagtggaactctgcccccaccaaccctattcagcctcctcctctatgctcaggcagctactgcttctcagccatcagtacaggctacctcattcaagttgaatttgcaatggctgttgtggttttttgtttttctgaccatgtggggaactctcatataggctttggaattatatagtcctggtttgtccaaagcactctccacaaacaggctgtgtgaccttcaaatagctgcttaacccctctaagcctgtcatctgaaagtagaaatgataatgataacattagagtaaaccacatgaaagtgtctttgtaggttaaaaattgttgaatattggcagtctcataggttccacctaaaacctttgtggggttctggggaagattcggtaagagaatatatgtattactgctagggcctcagatctaactagtttaggaccacagaagaaggtcacgttccccttagtgtctgaaccacatctcctgtcaaatatctacaggataggagttcgaagtctattcttacaggattcccagtgatttcaggaatccttgtggcctcttattccctcccttgtgttcccctcataaagatgttgatgtttattgtgcgtttactctctgccaagtattgtgccaggctctttgtacataaacatcgatgtacctctctacccatgtgaggtgggtgcttctactatcatccccctttcacagataatgaaactttagatatgagctaagaggaatgaaaaaattaaaaataaaaaaaaagcagataaggaaactaaagtgcaaagaagcaaaatgttttgccaaggtcacaaggacctcagggtccgtatggttgtaagaagcagactaggccctaaggtttcttccatgtctggcatcctagggggttaggactgccactgagatgctgaacaaatgataaggcaggcacttccccgacaaagaatttgtgttggtggcaggaggagagaagaaagctgcgaccaggagagctgagccaggagcttttgcccacctcatcatctaaatgagcatcagactctcaggtgttgcagataaaatcccctggcatgtgatcataggtgacatctacccagcgctcatgatggtaatgccaggcactactccaagctccttacatgatcaatcatttaaccctcacaaccttggggtctaaacagtactgttagtcccattttacagatgggtaaattgaggtatggagctgttaagtcactggcccaggatcacacaaccaataagtgacccagctggagatggaacacaagcaggctggctcccaagtccatgacgtgaaccataccagatactgcctgtcagaagtgtaaacagccctgtctcataatcacctcctttgatttggaagcctagaccaggggtcagcaaactatggcctgagagattcagagctaaatctagctgaccaactgtttttataaataacattgcattgaaatacacccacattcatttatttattgactgatttgcaaaaaacaagggcagcagtgagtagatgcaagagatcataggcctgcaaagcataaaacatcaactttctgaccctttatagataaaacttgttgacccctgacctacagtatgcacctaaggtgtgtcctatgtgtcctaagatggctccgacacttgctatgtgaccccagacaagttgctttcctgaatctccatttcctcatctgtaaaatgtgcttgtgggaatttggtgaggaagtgtgtgtatgtgtaagtgcctgacccaaggcaggtgtttgataagggtttgcagctatcattgccaatagtatgatgaaaattatgactgattcctatgatatcactgaagacagggcagagacctttatggccactttatgggcaatgaaaccctggtgcagagagaggatatggtgagaggcagagcccaggtcttcccagtccaagtcctgcactctgctgcctcctttcccccgccttccaatccatagctgccctagtcctcatttatgtttgccagcgtgcggagcagcccttctgtgtttgtgagttttcggcatctgtaagtacccacagccgcacagagctcgccagcacagacatttgtcaaagatgacatgccagtcatccatgccaccggagacagtgacagatgcgctctccagccccaccatccaggcagtggaggatagatggggccttggcaccggcgcccgctcttggcctggcatgtgcagggagctgcagaccaggcaagagacaaattgcagcctggtcagtgggcaggaggctcagtgtgcatgcaggcagatgtggctgcagcctgcccctgaaccagacacctgcctgccctccccagtgtcctagacctgcccaaatctggtgtttgcttaagatttgtatgtggtcactgatgaggaggtgagtgctcacgggctttgggttgtttccaataataatagtgacaatggctgatgctaacatatgctgctctgctgttctaagtccttagcatacatcgagctctttaatccttagccatccggtggtggaggtacaggaaactgagcctagagaggttggaggcctcttccaagttcacacattaagtggcagaggcaggaatcaaatccagacactctggctccagagttcaatgcccctcaggactactgtctaatatttgagagcctggagtggaggaaaaatcgtgactaggcaaaggattcaggtaggcagggctcaccactaacctgagtggacaggaacaggttgccctgcctcaatttttccaccagaaaaaatgagcagtggctgctattgcaaggccctgcaaggtcccagaccagctccagggcaggcctctctgttcttctgggacccttgggcactaggtcctctgccgacacacattcactccctccgcctaataatcccaacccagatcccctggagtatcatctcgtagttcattaaaccatcacctctgtgtccctgaggcaagcttgcagtctgttgagattttgtagggatgtttatggctagtggcagcaaagggaacagaccacataaaacaaaaagagacagtatgagctcttaaaaagtttccaaagtctggcataaaagctcccacaggtgtttcattcatacaaatgaccagcttccctccgctctggatgaagggtttggaaagaccaaagtctggttcagtccagccagtctcctattgtgggaccttccttgcgaaagtacccttctttctctgagccttggtttccttgtctgtaaaatgggtataatgatagtacctatctcataaaattattgtgaggattaaaacacaaaaaacacttagaacagggcccgacacaaagcgaatgctcaacaaatgccaactgttctcattctctggtttttagtttcctcagtgggaaaatgaggaggtgagttttgtgccaggtatgggcttctggctcgaacattctgtgacttcatgatgttcctagggtgcttccttgtctcctcccacttgcctgagtctttcttctttgtttctgtgagccccagccaattagtttactcacaagtgtagggtagagagaactacacaaacaggaagtgttaccactcatactcacagtggtgaatcattccaaccttccatcaagtggatccacctccattggtcgacacagctggggaatctgagctactgtggccagaactctgttgaccacatcctgcaatgacagacctcagaatccttcctgaaccttccatgggaaggagtctgtgacagcccacctgtgtagactgggcctcatcagcctgaatttgctgaaataagtaattccagtttccctgaattcatgcagagggcacccacgctgggaaggagtttctctggcttttcaagctccataaacacttgaaaagtcattttatttttcaatctgtgggcaggatgccaccaaacgaggaagcctcattaaacagaccttgaaggctatttctttgttgttttttttgtgggagtgggatgaggtttggtgttggcttttttttcccccactgatgctttttggataaacacataaatcagcatcatctatattcattagatatcgtgccttgttcagtacaaaattacccctgttttgcatgactttccccccttgtgattaatataaatgacttaagttaattatgtttctcttcatggaaaaatgtatttgtcaaagtgctgaaacatcaataaaaaataaacactgtcatttgaagaagggctcatttgcaaatgagtagctggggtgtggggaaaggaatggactcacccgtctggaggtgtcattctgattgagtaggcacacttcatatttactaacaatgacaaaagcatttttcttagttaagcactcacaggtcctgatgaggtagactgatgtcatcattattaacaataatgacacctcaggcgtagagaaaacaattttccttactagagaaaactaacgctgggtattttaccatccagacctccaaaactaggcccagcatggggactttgcaggaatagaccaagaggcaaatacagatgattggagtgggagggaagagaagtgaagaaaagcaaaccatggagctggtgtggcatctcagagcaacatggaagcttagggatgagacagcacaaacacctccctgggccaatgacaagactaagaaccagagaggggacttgccccttgggtaaacagcatattagtggcagagcccagagagaacccaggactcttgactcctagacccccaccctttccctgcactctgctgcctcccttgccaccagggatcaaaggctccccctcacttgagtaagtggtcaatggcaccagcaaggtgcaggggctcagactgctggacagtcagggccccagggaaatctacaggttactgacttttttcatggtatctggaatagcctttccccacactgactgtcttagtttgggtttcctgaaggcagaccctgagacaagatcgtaggtgctggtggtttatgtaagaggtgagcctaagacaccaagtgaggtggagaagtgagacagggaagggagaaaagccaatacagggcacatgtatgagggggttactgctttggacacttggactcactccccccaggagtgactgcagagaatatgcctctgagttgtcccggtgctggacagggaagcagaaatatttatttactgacctctggggactttaatttccaacccctctgggtcaccctgtacctaagctgagcaaactcccatagtaccagaaaaacccagagatccaaaaccctgagcaggtgagtgggaagcgctagtgggcacagtcactgtctatggcagatgcacgtgaacctggaggtggtatggggggatgtgggtggggcaggcatgttatctactacatcacccttatctaagtgctcccagccttccaagaaatcccccctccaagtaaacatgatcatcttgtcttctgatggtcagaaaccattcatctggccaccttattttacttatcttcttaaatattatttctgtcaccctaaatatactgtaaagcattcaagggcaaaattaaggccattatcattctgtcattcaacaaatacttactgagcacttactctgtgctggactatctttaaggtgctaggaatatagcatcaaagataaagaaaatccttgtcttcaaggaacttgcatcttaaaagtagagctagacaataaacacataaataaatgctataatttcaagtggtgataagtggctcaaagaaaaagaaagcagggtaaaggggatagcataatggaagtgcagtactcctggggacatttgagcaaaagcctgaatgaaataccggagtaagccatgtaagaatctggtggaatggaattcaatcaaagagaatgtcaatgcaaagaccctagggaataacaggaaggctggtgtgacactcagcggagtgaaaaagaaggtggtaggaactgaagaaggggacaaccagatcgtctaggaccttacctttaaacagtgcctggcacaaaagaaaggtactccaagctgactggatggatagatgggtggatataacagatggaaggatggaaataatgacagactagtggatgaagaaagaagaaaacaaagcaggttctataggtagagtgtggtgccaatggtgcattcaaagccagactttgcagaaatagcaaatattgaacccaaagtacccaatgagtagttattagaccaaggaagcagttgaaggagaaatgttcctctctgggcttcagccaatgagaatcctagaaacctgagtgtccttatctttctttacattccctgcagaggcccagcttctcccctgtggtgagtatccaataacattaaatggtattacagtggattaattaaactttggtggctggaagctagtgaatcattccctccaccacatattaccatgtttactcatcagggctccatttttaatagcggtcttttaattaaagcatgtcaccacggtccattagggaagaatttggaggatgagatgtgcatgtgggtgcaagcatcatttaattcagcagttctttactgagtgcctactatgtgcctggcaagtcttgaggtactatgagaaaataaggtgcaagtgaagggcttcaaggaacttacgcgatcaaacaaagtgaattcacactcacgatcaactgaggaacattggcatattaatcattgcttgccaactaaccagaattctttattagtaacttctcccacctagtttaatttggaagaaccaggccaatcataagaaaaattctggggcttttcgttttcagcaaaatatccagggtatactgtggcctagaccctgatgcagtcatatatctttgggaaagcctcctaaaacttctgagcctcaatcagtctcttcaagaataaaagcagaggttgttcttatccagaaattctctagattccagctgtaacattttctcatctgcgaccctccaaatctccaggcccagaccatgaggatgggttttccagaatggtggaaatttcatctaaagtcactctaagatttttacccaccagagaaagatccttttcattacattcatgacattttgttttctgaattttcaaagaggaccaagaagacctgtttggaagtaggagtagttacaatgcatgcactatgtgtgcacttagatgaggaggaacaaaccacatactgccagaaaagcaggctctattcatggggtgactgggtaaaaggcattggaactggaccctaaagactaggtaatagtttgagagtaggagaaatggggggaaagagccaattttcagcctgattctagccatgttccaagtatgggtccccactttgcaactgcatgacaagctcccccaggaggagggaccaggtctctttttcttttgtctgagattcttccttccagctcttcactccttaggcgagctcagccagtctcataggttagggcccacctgtgtgatgatgactcccacatttccatctccagctcagcacctctctgcggagctctctattcagtcagctacctgcttggcacagcacttagaggcttcaagacatcacaaacaacgtggacaaaatgaggctcctatttctgtgtccagtctgttgatcctcattcttcaggtctcaatgtaggagtcacttccccagaatgtaaatatatatcttaccccagaatgtgtgtgtgtgtgtgtgtgtgtgtgtgtgtgtatatatatatatatatacacacacatatatgaatatatttgtttatatatatttatatatacatatatatgaatatttatttatttatatatgaatatttatttatttatttatttatgaatatatatttatttatttatatatatattatatatatgaaggaggggtcaggacctctccgatccctcttctataaacaccctaggttttccttcacaaatgttgtcacattgtcaggaaatctttgtgttgtgatatcttttctgtgaggtatttgatgaatggttgcctgtcttactggatttttaagtcccattgggcatagatcagcccccatttactcaccactgtctcctgagtacctgggactgtgcctagaacataataggcccccagtaaatatttgttaagggaaggcatgggttccccaaccccagccagtgtgcaagatccatttccgcataccactggcacacaacattcaggcactgggagccgcacagtgacggaagcttgaacattttcttcgtgtcaagttctcagtaaagctattttctcacattgtctcatgtaattcttaaaccaccctggaaggaataggttttattgctgtttccattatataggtggggaaacatggctcagaggaaagtggcatgtccaagatcacacatcctgcaggggacagacagaccaaacccatgttttcaccagcctctcatctcacaaacaacactaggtttgttaatacctgggaactctgtgtaagcgaggtccctggcttggtgtcagaagacctgggtttgagtcttgacaatgtcctttgtaagtagcttaaggtagctcctcagttccctgtgagacactgcacacaacatcctttaaactgccttaagaaaaacagccctacaaatgaagactccattgccactccctttgaagcagctgctctcagagtcctctgcactgcctcatctgaattgaactatctccccaccttctcgcagaatcaaaaactagaggctgcaggctgaagagggcaccattattttgtttaactcacagagtatttaaaacttttttttaagttgttgggtaaattctaacaggttttcttcagggtccagatttttaccttctcttgaaaaattagaagctcctgcaacatcagtcccacagctctgcacatcattgactggcatcaattggttgagccaagaggtagccatgctctctccccagtgtgccactatccctacctgaggctgggaatcaggtgtcacttaccttgacatctgttcccttatttttccaacaatgggaatacatttttctgcattcatgtcgctaacagaactaggaaaagcaagcctggaccacaaggatagtgcagtgagagataatgtgagtataattcttgatgcaagtgaagaataatcatgagttcaatatggttaagtgcatgtgtttcaaaacaacacaacccaaacaagattcagcaaaaatactatcccccagctctattttgttatgttgcctctatgacccctgtaagattttgaatttcagatgcttgcttcagttaaataaagagttttctagatgaaggcatgcagtaggtctctaacactgagccactgccttgtccctctcaattaacctttgtctttaagtccctgtctaatgcctactagtagctaggtccctgagattgtaaagaccccaaggccccaggaccctgaagagcccaggaagtatcagaccaatgaaccagacctgaggtctcctgtactcttcagcttctgaactataggagaatcccaaggaaaacagggcaacaacaacttataataaatagtaatactgccagaatcctatttgtatttaccagtttgcaaagcactctcattcattcaacagtcatatggcaaatataagttgaggctctattacagatctaggccctgtgggcgtgatgttatacttggtagtcaagatccctgaccttaggaagcttccagtctggccaggaaacatcagagaactaacatttctatagcactttaccatgaaccagtcactcttctaggtgctttacactgagtaactcatttacccttcatagcaattctaggagataagtactgctgttttccccatttcacagatgaagaaactgaggctacagaagttaagtaacttcctcaagctcagtggtggagccagccatctgacccacagaagcaagttgctggaggcaggcttttgggaccacagactgggaagatgatatcttcaccagtgaagatttccaaggccaacatcacatggccaaattgcatcaccccatggccctgggctcttctccctgttcacactaaaactcagaaacatttattcatggggggagtagtcagcacactggttgctcaggtctgagaatgccagggctgagctagcagggtttgcaggtcccaaggcaatttgcatctcctgttggaagtcttcctcatcaaagcaacggaaatcaatgcagtaaatagttataatgaactgacctgctcacactccctgtctcttcctgaggaagaggaatcatgagagacacattgtttccaaatccttcacctctttccccctcgcctgatcctcccacagggaatcctctttgctcctgtcaacagtgtttgagatgtttcagagtttttattggatcttcattgtagctctgtctgtgaggattcagtgaagctaagatttaagggccagagagagttgaaacttctaccaagcatcagccatggctgccctgctttccagagtactgtccacggacctctgggcctcagggactagagaatgtcaggggaccatctcatttcatacatgtaaaaactgaggcacggagagggcaggaccacccagcacaggatcagcacacctctccaacatcagtacaccccaccttttcaggcagatacaggaatctcctccgcagcaaagtgttgataggtgggaagcagtgctgtgatgcccttagctttggcatccaaatgcttgagttttaatgcctgacccaccatttccttgctgtacaagaccttgagaaagctaattaacctctcagtaactgttttctcatatataaaacagggatgaaaataaaagtatgtgctccattgagttgttggaagctttaataaacacaggaaaaaaattagaattgtgtctaccatgtagtaagtattcaataaatgtcagtgactatgcccatgatgaatatggtgaatatgattatgatgatcatgggcattatccctggtgctaagagtcacttctacaggagtttagcttgccctgacctagaacattgaggcagggcatgaactcaatgttgcactgagaaccagtctaacacaggaatgttttctctgtttcacaggtgtcagtcatgttctctggataaatgataagattgaaagtccttgaaggcaggagacagccccagatatcgttttgttgtctgacacaataccaagcacaaatgatgtgcctaaatcctgggtctttaacccaaggccatctacatatgccctgggcctgccagctcatgaaaaccagcctctgtggcagttggggtgctaaggaattgctccagttgagcttcactggtttttactcttggctgtcatgcttggatctcttgattatgttccatcagttcaccccctgcctctgggctgaaagatttggtgttctttctaagttttcttgcatgatttgtggcttagaacgtctttcccgtacatctctagccctttccatctcaaatgttgactcagattattggctcagggcaaagccactggctccagctcttaaccctgtagaatctcacctatccctggcacccaacatagacatccaccccttcaactccaccaagctagggagtagagagtagttgtcttttccatccattctctcccttcccctccttgtctaatttctaagagttaagagtgggcacttttccaacatttccgtggttacgggtaactatgtcactcaatcctggccacatgaggtgggacactagcccactggaagagttttcttcttaatagaagagagaaatctgtaagaataatcccccactgttcctaccttgggtgctattatgtgaggccttgatgcttgaacctgtggcaatgatcttgcaacatgaggaaagggtcacaagaattgcagagatactgactggagccctgagctgttaaataaaccaactccaaaccaatgggaatggggtatggaaccaccagtctctagattttctgtgacaaggaacaattaagcttccatatttcttaagcctattttagtcaagagctcagttagttgcaggcagaagcattccaaagttttatcaagtaagcatcaatttgcctatcacaaactttatcaaggtgttggtagattctaccttgtagacataatgtgatctactaggaatctatgtagaaaattcaagaatccaagaatttgggagaaaacttaaaagtcgtccatatctgacatatagatcaatggaataaaatggagggtccagaaacaaactctcatatttatggtcaactgattctcaacaagggtgctaagaaaattcaatgggggaaataataggctttttgccaaatagtgctagataacagaatatatccacatgcaaaatatgaattcagaaccctatcacacaccatataaaaaaatagctcaaatggatcaaatatctaaatgtaagcactaagactactaaactttaaaagagaatgcatgtataaatccatgaccttggattaggcaatggtttcttagatatgacaccaaaagcaatcaaagaaaaagacatataaattggacattaacaaaatttaaaaatgttgtgcttcaaagaacatcatcaagaaaatttaaaaaaccttgaatactgtatatattttctccaaaaaagttacacaaatagccaataagctcacaatgtgcttctctgctgagcccagagagagcaagatactactactcaactagccctttagacagccaccacaaacacatacgaacgggcacatgggatgaaatgtgtttaccattcccaatctaggacaacggtacccaaaggaaatgttggtgactatgcccatgatgaatgcttataaaccaacatttcctttgttttgtaaaacatttgaagccatgtccatggacacagaggaaaccatgacggcaccagaatgtctatttctgtccttgagatgatgctaagactaggatatccctgtgtctaggaactcactactattgtactggtgtagctcagtccatctttgaggaacaaaaagaagttctatttttttatttcaacttttatttcagattcagagggtacatgtgcaggtttgttgcaagggtatattgcatgatgctgaggtttggggtacaattgaactcatcatccaggtagtgagtatagtacccaataggtagtttttcaacccttgcccctctccttccatccctctcttgtagtccccagcatctagtgttcccatctttatgccatgtatactcaatgtttagctcccgcttataagtgagaacacgcagtatttggttttctgattctgtattaattctcttaggattatggcatccagctgcatccatgttgctgcaaaggacataatctcattattttttatggctgtatagtattccatggtacatatgtaccacatattatttatccaatccactgctgatgagcacctaagttgattccatgcctttcctattgtgaatagtgctgtgatgaacatacgagtacaagtgtccttttggtagaatatttattttcctttgggtatatccccagtaatgatattgctaagttgaatgatagctctatttttagttatttgagaaatctcctaacagctttccacagtgcctgaactaatttacactcccaccaacagtgcaaaagcattgcctattctccgcaacctcgccaacatctgttgtttttttactttttagtaatagccattctgactgatgtgagatggtatttcatagtggttcttatttatatttctctgacgattagtgatgtggaccattttttatatgtttcttggccactcgtatgtcttcttttgaaaagtgtctgttcatgtcctttacccactgtataatgaagttgtttttcacttgttgatttgtttaagttccttatagacctttgtcaggtgcataccttgcgaatattttttccctttctgcaggttgtctgtttactctgttgatagtttcttttgttgtgcagaagctctttagtttaattaagtcctacttgtcaatatttgtttttgttgcaattgtttttgaggacttagtcataaattctttgccaaggccaatgtccaaaagggtatttcctagatttttttctagggtttttataggtcgaggtctcagatttaagtctttcatccatcttgagttaagtgataagtgcacacaaattaaggtttttttaagtatttttaacttttttaaagtattttttaggtatttttaacccttattttagattcaagggtacatgggcaggtttgttacataggtaaattcatatcacaggagtttgttgtatggattattttgtcacgcaggtattatgcctcgtacaaaacagtttttttttctgctcttctccctcttctcttcttccactctcaggtatgccctgatgtctgttgttgccctctttgtgtccatgtgctctcatcatttagctcccacttatacgtgagaacacgtggtatttggttttctgttcctgagttagtttgctaaggatactggcctccagttccaaccatgttcctgcaaagggcatagtctcattattttttatggctttgtagtattccatggagtattgtaccacattttctttatccaatctactgtttaggttaattccatgtccttgctactgtgaataatgctgtgacaaacatacacatgcaggtgtctttatggtagaataatttacattcttttgcgtatatacccagtagtgggattgctgggttgaatggcagttctgtttttagctctttgagaaattgccacactgctttccacaatggttgaactaatttacactcctaccaacagtgtgtaagcgtccccttttctctgcaaccttgccagcatcagttattttttgacgttgtagtaatagctattgtgactggtgtgaaatggtatctcactgtggttttgatttgcaatcctgtaatgatcagtgatgttgagctttttttatatgcttgttgggcacacgtatgtcttcttttggaaagtatctgttcatgtcctttgcccactttttaatggggttgtttgttttgttcttgtaaatttgtttaagttccttacaaatgctggatatttttaggtctttgtcagatgcatagtttgcaaatattgtcttctattctgtaagttttctgtttactctgttagtttattttgctgtgcagaagctatttaattagatcccatttgtcaatttctgcttttgttgcaattgcttttggtatcttcatcatgaaatcattgcctgtgcctatgtccagcatggtatttcctaggttgtcttctaggggttttatagttcgggattttacatttaagtctttgatccatcttgagttgatttttgtatatggtgtaaggaaggggtccagtctcaatcttccacatatggctagccagttatcccagcaccatttattgagtaggttttccctcttgcttgtttttgtcagctttgtcaaaggtgtgcagccttacttctgggctctctactctgttctattggtctatgtgtctgttttttaccagtaccatactgttctggttactgtaatccagtagtatagtttgaagtcaggtaatgtgatgcctccagttttattctttttgctcaggattgctttggctattcaggctcattttggttccatatgaatttttaaacagttttttctagttctgtgaagagtgtaattggtagtttgatagaaatagcattgaatctataaaaatttcttcaggcagtatggccatttttacaatattgattctttccacccgcaagcatggaatgtttttccacttgtttgtgtcatctctgatttctttgagcagtgttttgtaattctcattgtaaagatcttttactttcctagttagctgtatccattctttaggtcttttattctttttgtggaaattgtgaataggatagcattcttgatttggctcagggcctggttgttgttggtgtataggaatactaattatttttatatgaatacattgattttgcatcctaaaactttgctggagttgtttatcagcttaaggagctttggactgagactatgggattttgtagatacagcatcatgtcatctgcaaacagagatagttttacttcctctcttcctatctgggtgctttttattgctttatctttcctgattgctctggccaggacttccaatagtacgttgaataggagtagtgaaagagggcatacttttctttttctgcttctcatgggaaatgcttccagcttttgcccattcagtaaatgttggccgtgggtttgtcatagattgttcttattattttgaggtacattccttcaatacctagtttgttgagagtttttaacatgaagggattttgagttttattgaaagccttttctgcatctactgaggtgatcatgcggtttttgtctttagttctgtctatttgatgaatcatgtttattgatttgtgtatgttgcaccaaccttgcatcccagggatgaagcctacttgatcatggtggattagctttttgatgtgctgctggatttggtttgatagtattttgttaaggatttttgcatcaatgttcatcagggatattagcctcaacttttctattttgttattgttgtgtctctgccaggttttggtatcaggatgatgctgaccttatagaatgaattggggaggagtccctcctcttcaattgttttggaagagtttcagtaagaatggtaccaattctggtagaatttggctgtgaatccctctggtcctggactttttttattggtatgctatttataactgattccatttgagagcttgttattggtctgttcagggattcaatttattcctggttcagtcttgggagggtgtatgtgtccaggaatgtatccatctcttctagattttccagtttgtttgcatagaggtgttcatagtagtctctgatggttctttctatttctgtggggtcagtgataatatcccctttgtcatttctaattgtgtttatttggatcttctctcttttctttatcagtctagctagcagtctatctattttattatttttttcaaaaaaaactaactcctggattaattgatcttttggatggatttttgtgtctcaatcactttcagtgcaatatgattttggttatttcttgtcttctgctaattttggggttgctttgctcttgcttctctagttcttttcattgtgatgttaggttgttaatttgagaactttctaactttttgatgtgggcatttaacgctataaatttctctcttaactctaccttagctgtgtcaaagagattctggtgtgttgtatctttgttcttgttagcttcaaagaactttttatttctgccttaatttcattatttaaccaaaagtcactcaggatcaggttgcttaatttccatgtaattgtatggttttgagtgattttcttagtcaaattctatttttattgctctgtgatctgagagagtggttggtatgattttggttcttttgcatttgctgaggattgttctatgtccaactgtgtggtcaattttagagtacatgatatgtggttatgcgaagaatgtatattatgttatttgagggtagagagttctgtagatgtgtgtcaggtccatttggtccactgttgaattcaggtcctaaatatctgtgttaattttctgcctcaatgatctgtcttatactgtcagtagggtattgaaatttcccactattattgtatgtgagtctaagtttcttcgtacttgctttatgaatctgtgtgctcttgtgttaggtgctgcatatatatttagaatagttaggtcttcttgttgaattgaacccttcaccattatataatgcccttctttgtctttttctttatttttgttgttttaatgtctgttttgtctgaaattaggatcacaactcctgcttttttcagttttacattttcttggtagatttttctctatccctttattttgagcctatgggtgtcattgcatatgaaatggatctcttgaagacaagatattattgggtcttgcttctttatccagcttgccactctgtgtcttttaattggaacatttagcccatttgccttcaaggttagtattgatatgtgtggatttgatcccgtcatcatgttgttaggtggtaattatgtcaacttgtttgtgtggtagctttatgatgtcactggtctgtgtacttgtgtttttgtagcggctggtaatagtctttcctttccatatttagtgcttctttcgggactccttgtaaggcaggtctggtggcaatgaattgcctcaactttgcttgtctaaaaaggattttacttctctttcgcttgtgaagcttagtttggccagatctaaaatccttggttggaatttcttttatttaagaatgttgaatataggcccccaatctcttctggcttgtagggtttctgcttagaggtccacgttagtctgatgggcttccctttgtaagtgacctgtcctttctccatagttgcctttaacatttttttctttcatttcaaccctggagaatctgacggttgtgtcttggggaattatctttttgtgaagtttttgcaggggctctctgcatttcctaaagtttaatgttggcctctctagctatgttggggaagttctcacggatgatatcctgaaatatgttttccaagttgcttccattctccccatccttttcagggatgctaatgagtcacagattcagtctctctacatagtatcatatttctcagaggttttattcattccttttcattctctcttctttattcttgtctgactgtctcatttcagaaagccagtcttcaagctctgagatttttttcttagcctggtctattctactgttaatacttggaatagcattatgaaattcttgtaatacatttacaattaccagccctgtcaagtcagttatgttattttctatactggctattttttctgtcagttcctgtatcattttattgtaattcttagcttccttaggttgtgtttcaacattctcctgactgttgatgatcttcatttctacccatattctgaattctagttctgtcatttcagccatctcagcccagttaagaacacttgctggagaactaatgtggttgtttggaggaaagaagacactctgcgtttttgagttgtcagagttcttgtgctagttctttctcatctgtgtgggctgatgttccttcagtctttgaagttgctgacctttggattttttttttcttttatcctatttgatgaccttaggggtttgattgtggcataaggtggattcagtcaactggcttcatttctaaaagattttagggagccaagtctcagctcaggactcctgggccacattctctaactctgggagactggtattgagccccagctttgttccctgactcctcgaggttaggaacctgatgcactgggggggccaagatgctgctggaccactggtcacagtgctctggtggatggtgccagccaaagcacttcacagggcagtggtagtgagctctgtcctcatttgcacatgccagtagcagtgcagtggcagtgcagcagggtgcatgctcagctgcagcagggtgttagtgggtactggggtgctggcctctgtgcaagtgttcacagcagcagcagtggcagcacagcttggggtgggccccactggacactgggcaactgtgcatgcattaacaccaatggtggtgttagcatggagacagggtgctagtgggggcaggactgtgtgtacccttgtgcacgtacatgagggcagcagtggctacccagggtggggacgggtccactgtttcagctggggtcaggcattggcaggcaaggctagcaggcttcatgcctactaatactctgacaacaatggcagttgggggggcagtgcactcaagtcagcagcagtggcatgtcagggtgcctgcacacacatatccttgtggagaaggaaaggcaaagtccacctgcacaaggtccacatgtgctggcaaagtgatgtggggagaccctgggtgagtatatacaggcaaagtggcacaggggaggctacagtaggggaagagcaggggtggagttagtgtgtgtccacgggtggctctgctggagcactctgccggtcaggtacagcctgccagccctgaagctatgatgcaggccaaggcagtacctgagggctgcactgcaagcagttgtggccaggctggggcctcaggagaggccatcagactaaggggtgctcagatcagactagtcctgtctcatgggcaagaccaccctgcagttccagtctaacagttcccctagggctatagtctcttatggcagcaagttgagcctaagaggatgggcatccctggccatgcttcactacagatgcccctacaccaaaccctctgggctccacactacctggagttcttccccatctcttctctaagcagcaattcctgccaattcaagtgtccatggtagtcgagtggtcacctcctggtggaattccagaggcccaaggttagagcaggttgctccttgcctgttgaactcaccccttcatgcaggcatcattgaggggcaggaacgagtcccagtgtgcagaagccccttgcagggttcccagcttcctcctgcttcagcccagcctctgtgtcttccttatattcaccctgaatgccttccctctgaagacatgctaggagtgcaccagtcttcctgatatcccagtctctcggtgagagatgttcctcctggctgtgtctagtcagcagccatcttggagctagtcctctgagctcagtttcattcttctgcatatggatagtcagttactccagcaccatttattgaatacggactttctccattgcttatttttgtcaactttgtcaaagatcagttggttgtagctatgcagctttatttctgggttttctattctgttccattggtctatgtgtctgtttttgtaccagtaccatgctgttttggtcactgtagccttgtagtatagtttgaagtcaggtaatgtgatgcctctggctttgttctttttgcttaggattgctttggatatttgggctctttttttttttggttccataaggattttagaagttttttctaattccgtgaaaaatgacattggtagtttgatcagaatagcattgaatctgaagattgttttggcagtatggactttttaaagaattgattcttccaattcatgagtatggaatgtttttccatttgtttgtgtcatctatgatttctttcagaagtgttttgtagtttttcttgtagagatgtttcacttccttggttagatgtattcctaggtatttgtgtgtgtgtgtgtggcgattgtaaatgagattaggttcttgatttaacgctcagcttgaacattattggtgtatagaaatgctggtgatttttgtacattgattttgtatcctgaaactttactgaagtcatttatcagttccaggagccttttggcagagtctttagggttttctaggtatagaaacatatcatcagtgaagagaaataattcgtcttcctcttttcctatttggatgccttttatcttttctcttgccagattgctctggctaggacttccagtactatgttgaataggagtggtgagagtgggcatccttgtcttattctagttcttgaggggaatgcttccaggaaaaagttctatttcacaagcaatcaaagaaatgtaaaacaaagcaatgaacatttgtttttcatccataatattaacaattagttaaaatataatattcagtggtggcaagggtatggtaagatagactcaagttctcactggaataaaatgtagtccatctgtagaataaagttgaacaatgtgctcttaaacccaggcattccatccttattcttatcataaaactcagagattaagatgggtgttaattatataaagtcattaatcaagattcttattgtacaagccagtaattgaaacaacttgtatatgcagcaagaagggaattgttgaccttatggaagagtagaatgatagatgccagcagctggaaatgggtggggggaatgaaaagaggttggttaatgggtataaacctacatttagacagaaggaataagtcctacatttaggtaggaataaacctacatttagatagaaggaataagtcctagtggacacagtaaggtgactatagtaaacaatttattgtatatttcaaaatagctaaaagggaagacttgaaatgttttgaacacaaagaattaataaatgtttgaggtgatggatatcctaaataccttcatttgatcagtacacatcacatgcatgtatcaaaatatcacatgtaccccataaatatgtataattatctatgaataaaaaaagaaaagaaagaggggaatggttacataagttataatatacctatatgctagaatggattttgaaatagttggatggcatcaccatataacgttacatttaaaaaccagggttccagccaggcatggtggctcacacctgtaatcctaacactttgggaggccaaggcaggcagatcacctgaggtcagaagttcaagaccagcctggccaacatggtgaaaccccgtctctactaaaactataaaaattagccaggtgtggtggtgggcacctgcaatcccagctactcaggacgctgaggcaaaagaatcacttgaaaccaggaggcagaggttgcagtgagctgagattgtgccactgcactttagcctgggcgacagagcaagaccctgtctcaaaaagaaaaaaccagggtccaacattaaaatgtacatgatttctaattacataaaaatctttgctaattcatagaaatgtgactggaaagaaatacaacaaagcactgataatcacagttactggacagtgggatgaacagtaatgcatatttctgtctgtattctttcctatactctccacattttctcaaataatcatgttttcttttttagaggaaaaacagcattattacaaaaaagaaaggagccaaagatcttaagtcaccatggctccttctattgcccgctgagctgtgtctcccaagctcactgaccttcagaggctttgttcataaaataaggacaatggtatctaagagtcttcacagaattgctgtgaagataaaataagaaaacgacatgctttgtaaattgtaaagcattgtacaaatgttagctgttactaacattataacacagaattaattccaataatctgagagaagagaaaagaaattcataataagatacctcaggctttgacataggaactaggaaaatacaagaataagctaagaatagaaagaagtaaaacatccacaggaatcctggagaatgttcactagcatatctcaggaagctcagagaaaacatttaacaagaagccaaaaaaaaaaaaattcacaaggcaaccaaatattaacagcactgcttggctaacaagccacacatgatattttgtctttaggttttttagctttctgttttgtttcattttgttttttcaagtcttctgaaaattgagaaatgatcaagttgggagaatggaggagttcactcattgtgacaggcagataaaaattagagataacttaggtcaaaatctattgaagaagcatcttgctccaaaagtcaaaatcagcacccagagggagaaaactggaggacagagagggcacttaatgatcacagggccaggactggactcagaaatgacaaggacccagcaaaaggattcaaattctttaccttgcaaaggaaaatgcctgtggccactcgttgctgcccactccttcctatacaagactctcctattcttgcttcttgagtgctcacctgtcccactcccctgcagctccctctctgacttcccttccctccccactccacactgtgcctgctctaagggtcctttttcactccctgctcttgcctatcctccctgttatttctccctgttctagctaacaccttcaaatctacatcttcatgcaggatcatttctcaacccccttaccatctctctaaatgcctctcagacacacacccccagaagccttgctgcccctggaaactaagcctgcagccaaatgcgtcttccttttttttttttttttttttttttattatactttaagttctagggtacatgtgcacaacgtgcaggtttgttacgtatgtatacttgtgccatgttggtgtgctgcacccattaactcgtcatttacattaggtatgtctcctaatgctatcgttcccctctcccccaaccccacaacaggccccggtgtgtgatgttccccttcctgtgcgtcttctaaaaaaaatgcgtcttctaaaaaaaacgcaaacaaaccagtgaaagtgggttcaatgtatccttacttgctagtcctaataacaattctgctagaaacaatttcctcttgtgcttcttcttctcatcccaaactaaactgatcatgtcccaaatactattaatacaatctttcatatttttttctaccaggcccttccacctgcccccatcccagtccagagattgataggtcactgtggcagctttctgattaccttctcatcactgcatctcctctccccaatcacttgtaaatgccactgtcaaagggagttttgcaagacaacactttctcctcacttggattctcccaacaaaggctttcaatgactaccttaaaggcctattagataaagaacaaatgcttttcctaacattcaagctcctgagtcctagctaagggctggatggatggaaatgtcttggccaagttcaagggttgggccaagatggtggccaacattagatttcaagcatgaaggctagggataccagttgtcatgagttaattgtgcatgggcagggctgttaatggtcaaaaaaagagtcaagtcttgggaaagaatataattgtcaacatttgagcataaagaacaacctcccaaagcagaatcattccagaaatggaaaggaacacagagatgagaggcaggagggtgggcttcagaaacaaggacagaagccaaagttggggccaaagaggcccttcccatgggcagatcagaagtgtgcttgctcagagcccaggaggctgaggttgggcaacatagtgaatgtgaagccaactctgtggagcacttgctccccacacagtgctcactcttctccatagaataaggcaagctgtagctctgaaaaagtcaagagtgtagcttctggaaaattaacctaaaagtatagaagccacccaaagcatagaaagcatccattcatcaactgatgaatggatagacaaaatgttgtatatccaatacaatggaatattattcagccataaaaaggaatgaagtatgttgcatattgcaacatgataataccttgaaagcattttatgccaagtgaaagaagccagaaacaaaaggccacatattgtaagatttcatttatataaaatgtccagcatatgcagatctctagagacagaaagtatcacagattggtgattgcttagggctgggaagattgggaggctaatgggtaataattaagaggtatggggtttccttttggggtaataaaaatgttgtaaaattgatggtggatgaatgtacaactctatactaaaacacattgaattatacactgtaaatggtaaattgtatgttatatgaattatatctcaataaagctgctttttaacaaaggtggcagttggttcaaagtagacttcaattctacacgaccaaagaaagaatcaaaaaataagtcagcaaggaaaaagtgaattttataacacctctatcctggcagcttgtggaaagcccaaagacgtgctatgtaatcttttctgtctccattgcgagattattttcttttctctgccccttggtgctacctctgcagcttatacatatttctgtttctccttcaatagcaatagattataactgttggccaccctggctgcttccctactgcacactgtggctctcagaggactgagactgttccctattggctcctatatctctagtccctggcacaagattgatgctgactaaataactgttgaattgatattaatgttataaatcctggtcccttttatctaaaaaatcttactatctgatgagaaactagtaacactagttgctgatgaggagaactcagtagttagggagagggatgggagagaagcattttgcacaccctttagtacctctggaatttcatgtatgtcaatatgtcaccttctccccagataaattaatttaatgttttaaattgtttaaaaatatatcatttattagcaaagacacagaattcatgcatttgacaaaacagagaactgtagaatgtgacaaagctctcaggagagcagactcagacagcaaactcttcagtgggaggcccaggggagtggaaatcaaagtccccaggagaccagagtggagagaattatagctctcttctcataattctaaggaagcaattgtagttctccattcattcttggtaatgacatcagggtttctctgccagcctcaacaatctcaccactgccagtctcaaggctgatacagattcatccacatcatgtggcattcacatccttgctgccatgcccacctgtccactcaggaggacagctgctgcagccagaaactgggagagaagacctcattgctgggcagaattactcactaactagtacagcatacgaagaccaccctcgccacacaaggagaggcacacctggaagcactggaagagaggctaacctcgtcccccatgccctttcctcctttctttgaaggtttttcccctctcttgggaccacttatgcaccttaagacccctggaccctcatgctgcacctcattgtccctaagcactgacgcacatcacagtgagaaaatagaaaataatgggacccaaatgtccccaaaagacaccagccctcacagggagccagcacctggttggggtacactttgaaatggcctgtagatgtctcagcctctgcctcctccaagtaagcaccctgaaagcagctctgcaactcctcaccattcatcaccagcccccagcatagtcccggtacatgacaggcagtatttgttgtttagctaacaatgaatgagcatgtagtagtgccatgcactgttgcagttcatttaatcctgacatcagccttaagaggcaaatgctattagtcccattttacaagtaagtcacagagaacttgaaatcacttgcccaagagcccacagctactaagtgacagaaccaggacacaaactcaatcggctacagaattctttagcttaactgaaatgctcatgactcatacaagagatattgaaagtgtgtgtgtgtcagggtgaaggtgggcaggggcaggggtagaaggaagaaagagaaagacaagaaaagaagggtggtaggcagggagggacagaggaggagaaaaagtgaggtggatggaagggaggccactaggtcccgggcacaggctttccaccttgagaggcagcaactctatacggtcagtaccctacagtccagagactgacccaggttgaacaaactctcaagtgactgatgaataagccagaatatcaatcagtttattagtttcagagagaactattacttccaagaaaaccagagtctcacgtccattggtgggaggtcaatgtacatgggaaaaggatcagcctcatctgaagcttgcgtggaaagcaaggactcggtgccagagagccacaggatgatgttaatggcttgtgtcagtgagttatgattgtctggtgctccctgctcctcctagacccatctgtcaagcagagcggatgtttctgtcagccagtcgggaccccttgctttggacaatgccggaaaaacactgacaaattactgctccgtggcatccccttcctctagaccatgcacagaccaccccactttggttaatacatttgtttcccagacgaggcacattgtgattgattagatttcacaattgattaggtttcacaatcccagatgtttaacttcattatgcatggattcttcttactaacataatctcagaggacaaccatgttctgaaaaataaaaaggggaaaaaaacaggacttattctcaggcctgttgctgctctcatcctctaagttggctctttgtctcagaaaagggtccagtttgtgtcttcacagtgtgaacaaattgggaactggttgggagggggacatgatgggatgggatgaaaaccaagcctggattaaggaggctgactccactgcagaggaatgagcttacagctcaaaaaactgtgatgctactctagttagtctaatttaatcctagctgcttgtgaaggccatgcataggctgcctagcttatcaaatttctctggtacagtacaagaccttataaccagtagcagaattttttggtgtcactactaaaagtcatatttaaatttaccaagcaccttctacattgtagatgttgtgtcaaactcttacacgcatgtgttagttaaccattgctgtgtaacaaattatcttccacgattcagcgtcttaaaacaacatgcatcgactgtcttgcagtttctgtgggtccaggcacagcctagctgggtcctctggctctcacaatgctgcagtctcatcttgaggctggactgggaaagactcacttccaagctcatgtccatgattattgtaaagatttcttccctcttgaattgttggactgagagttctcctcctcagggagcccccatgagcttttggctggagacctccacacttccttactatgtgcccttctccatagaccatctcataccatggcagcttgcctcattagactgagcaagtgagagggcaaggaacagtaccagtgacagaaagagagagagagagaaggagaacgctagcaagaaagaagtcacagactacagacttaaccatggaagtaacaaccccttacttcgctctattccatttgttagaatcaagtcactaggtcccatgcacactcaacgggatgggatacagaggggataaatactaggaggtggggattgttgggagccagtcagaagcacatgacctcctcaaggcaaccctgtgagatagatgctattcctgttctatgaattttccagatgtggaagctcagagaggttaagtcagttgtccaaagtcacatagcttgctgatggtggaatcagatctcacatacgaatctgattttataatcattcactgagttcagcttggtcaagtgattttcccatagtggtcccaatatcctatcaaaagaaggtcactcattctgtcaatgagtaaggttggttgcctctaatttagcatgagactaatttgaagggagaccaatttttggtggccactagcatcaggaccaagatctgggcctttccaattctggactttgaatctcagacttgctgcagagatgtcctgtgctcctcctccaacctggctctgtcaacacaaggcagtacctcactcttggtcactgcctggtttcccttccctattattgtagctgatgtttgtatatacagtattccccttagcaacctgcccaatgacataaccctgtagcaccaggcatagttcaataatgtctcataaacacttattaaacactactttgtaccatgaattgagtgatgcagagaaaaatcagacattgcacctatcctcaagacagtcacaaagtgtcttgattctagcattgtgccatccaatacagtagctactggttacatctggctaccaagtacttgcaatgtggctggtctgaaatgagataagttgtcactctaaaataacagtggatttcaaagacatatgaaaaaagtaaaaatatctcatcaatatttttatattgattgtaaaacaataatatttggggtatgttgaattaaataaaatatactattgaaattcatttcacttctttttagtttttttaatgtgtaatgtggcattccacatcggactcacatttgtggctcttgtcacatttcccttggaccaccctggtctagaggcagggagtcacgtgatacccacaattcccatttattgagggttcaccctgtgcctgtgttccacatactctctctctacatggaacacaagttatttcatctagtcctcataataaactcatgcagtagacatcattatttcctcttaccactaaagcggaggctcggtggactgaagcaccttgcctacagccacacagtaagtgggtgagcaagactgagaagctatggggctccagagtccatcagaaagaggaatacacacctgtgctgttcagagtgatggacgctggaatggagccacatggggaacccaggagaaagcatccaactccaccttggaaggccaaggaagacctccagatagacatgacgcttaagctgagtaagcccagaataaagatatccacgaagccaacaggcaggagagagctttcccagcagaggaagcagctggcgtgaaaccccagaagcatgaaactgcgtggtgcattcagggaacagtgtgggtttgacataagaaagtggagggagataagacgagcaacataagcagaaactttgcagtaaaagaactacacaccgtgcagaggggtttggactttgtcctgttgggtcagtagtctcaactctggccgcgcattggaatcaccaggagaactttttaaaataccaatgcccaggacccatgtcaaagcaattaaatcggaagatcataggagatggtgatgaggtggcccaggctccagaatttgttaaatactctctccagcgattctaatgtgtggctgggttgagaagctcttcatagtattaggaatttgcggaatagctttaagaaatgaagtcaaatgatcagagttttgtcttaggaagatcattctgagggttgcatcgaaaatgaattattttccattctccagtaactctggaagccgggaaaccaagcgggtttctactgaaatagtccaggtcagggatgctgaggcctgaggccacgtagatgaatggaatggctgtgggggttgaggtgcggagccccctgagagaggcccctgctatggttctgaccacctccagcctcaagcacttccaactgcctcctgcatctctcccactaggtgtcccacagacatctccagctcatcacatcctcattggaattattacattcccccagagcctgttcctgcaggttttcctaaggtttccttcattcccctcatggctccctagaaaccctccacccctccaggtccatcatcaactcctctccctctctcccctcttttcccacatccaatcaatcagcaggtcttgttgcttttatcctcaaagactgtcagaacagctcttccctgtcactccccagcccctctcttattcaggctctttcatttatggcttgaatccttgtgacattccctgtggcaatcgctactggatttggatgtccaaagccatttgaaactctgattcaataggtcgggtgtagggctcaggcatcacacacatgcacacacacacacacacacacacacacgcacacacacaaagagatataatctcccaaagttattctaacttcgttttagatatgtggttctaaaagtatgtccttgtaccagcagcatcaacatacctgggaacttgttagaaatgaaaattcttggacctccaccccaagtctactgaatcagaaccctgggggtaagacccagagagctgtgctttaacaatcccttcaggtcattttgatgcacattcaggttcaagaatcacctatccaaactactcatggaaatctcattcccacttgctaatgattgattttcagtgtgcacataacccagttctggccaatgaaacatgaaagaaaatcttccaggagggcttctggaaaaaaaatgttttctccctgatagaaaaagggagccatattttaaaaaaagctctttctccaatatgtatactttatgtgagtaataggacctgttctcatgtgaggctgtgatgcttggagctatggctgctatcctgggaccatgaggagaaagtggagaggatcacaggaaagctaatccaaaacctgatgttaaactttcaaattaatcaattctggaacttcccaatcttcatatctgatgcaagatcactgtcattcttatttaagccactcttagttatatactttcttacttgcagccaaaagcatcctgacttctatagcctcctgactgttatccatagttccaggctcttcccttcaaatctatcctactgtgagaaactgtgaagggtcttagattttaccctatctacaggctaacaactgagcatgaaccctggtgaaaggcataaaacttcttggtcagaggcaaaatattgtattactcatggtacagcaagcaccatgtttgcatcagttccccttcttctcaagtcacacagggacaacactgtgggcccatgtggtacctacacacccagtgggttgcattacaggagaagaaccccaagccaagggcccaaaaaagcagtaagcagcaaacaacaaataggttctcctcctgtcctcccaggtagggatggttaccttgccctacttagtcacctttatgaccagatacagaactgctcagtatcgagaaagagacaaaccctgcaatctgagacattcagcaaaaaagtgcagggaagttcagagctcatagtgaactgcctttccaacaccgtgtttatcttccagctagagctcccaaatgtccatggctgtagtcacctaagtccttgcctcagataccagcagagtctgagctagcttgagcccttaatcatcccttctcatttctggctgaaacctatcacaccctccaaaaaagactgactatgccccagcggctcaaggatactcaccaggcactttctcttacctccgcacagagtccacttcttgtctggcatcacagttttccagactttcatcttccaccaggcccctcctctcatctgcatctctttgaatttatgcttcagtgacagtctcagtcttgattccccttttggtcctacgtgcccagggttctgcattttccagggcagtccgagtctactttgttctctcaccgccagcaccctggacttccaccagtccagatgagagttcagacaagcggctccctgttgcctcctaagcacataacactcctcactctggaatcaaagccctacatgccctcctccaatttccttctctgaaattatctccaactatccctctacagtctacacactccccagggttcctggactatgtggttttctccatcccatctgttgtttttcccctctagacctttcctcatgatctttgctggatttagaatgtgctcttcctccccactctgctcctggggaaatcctatccctccctcaggcccatctgaaatgaagactttggtaaacctctgtacggttctctccctgctggccaggccctctgcttcttttcaacccaggggctgtgagcttctcttacagttctcatctttccagtcttctgtgacgtcctcccaggctggtctcattcctgctgcaaaataaaagctcacaaaagcagggactacttgatactcccttttgtctccctttctgacctgagtactgttgctagctctgttactaatagtgttctcccctaaatgcgtttgaacaccatgactgctttttcctaactaaagcaaatgagaaagccctgctgtgaactgcatccccgccatgctagtccatttttctgctgccttagataccagaggagggatgaagccttcgtgtcactgaaactgatgtcacttgttgagtccgccaaagggcaaataggcaaaatacaactctataggggaaatatgttgtgattgggggtgtgcaaactacacaatctcccaaacagtgtgctgagaattgattccaggtatatctggatacttcagcccttgcagtagctaggtggggcctggattgggctgagcctagtgggctgtaaaaacatcacttttgtgtatttatgaaaataaaaaggattgaaagcctagctttagggatgtggaattcctagcaccaaagggcctagcatcttgagggtctaatcctgcaaaggtttagactgtttcactcataagcaccaaataaagggaattgtcaatgaaatgaagataagaatgaggagttgagagggggacaggctatgctgaaaaatgtgatgaaagcttgtgtatggattgggactaggatggaatggctcagaagaaacgagatgggcataggtctagcatgaattgtggtaagaacaggaggcaatgggttagagagggagttaatggaatttgcgtgagctggaaatagggtggatggataggggagtaaggctccacccagaaaaacccacctggcttcctcaatgtttcctttcctccatccttcccagtaccctgatggatagctttgcacagataaattttgttcccagcccatgtccaaacaatatcacaaaatcagccctagccagttgtttctgtttacagccctgtctgtgattgatccagctctggaaaagcccatttatcatgaggaaccaaagcttcatggcctactgtctattttgttgctttattccctagcactaaatgggacttcaggacctcccacttgttccagtacccaatgacatgcctatatttccacactcagtttgcccttcccttcagcccctctagctctcagccttcctgggaccttaaataagtcacgcagctcctttcaccaactcttttcttgttctcgttacttctgggctcttctgcctttctatctcgtctccttctctcagcagctcactgtcctttccaatttcagctgaaatcagattccttctcccttgcctttgctttcccacctcccatggcctctcttatcatttattatttaactcagtcaccatattatgtatgcacaagagccatttctgaacatggtcggcatgaaaaaaataggacccaaagcagaagcaaacacctcttccctatcagtctcacagctccattgtcatcctgctccagtcctgagcaaggtccagcgaaacagccagatctggccaacacaccctcaagcccaattaacttcttaggttggacacagggaaaatttccagatggctttttacagatatccttcaatttatgtaagagatgccttcctggaagtggatgtttgaatgaaattccaaatggaatatcaggagggtcaggcacacaggatgtgtggttcagagacccaggttctattcttcttgagatggagtctcgctctgttgcccaggctggagtgcagtggtgcaatctcggctcactgcaacctccacctccagggttcaagcaattccctgcctcagcctcccaagtagctgggattacaggtgcccaccaccacaaccagctaaattttgtgggtttttttttttcttaagtagagacggagtttcaccatcttggccaggctggtcttgaactcctgacctcatgatccacccacctcggcctcccaaagtggtgggattacagacctgagccaccgcgccctggcctccagcttctattctttaatagccctcattaacttacttccagaacttgggcaagacctgtagcttctctagatctcaatttccccatttataaaacaagggagccagactatatttcctcaagtttctttcagtgtgaaaattcaaaaactcctattttacttaatgatccacatgattccattggagatccttcctacagttaaaattcagctctctcctcatcaataggtcattacggagcatgtgctatgctgctgcgcctcattagaagggaatgtagattaacctggtgaagccctccttttatagatgaagagaccagagcccagagaggagaagcacctaatcctggggtcacacagccagtgagaggcagagtcagtctaaaatgtacaagtcctggcctgagactactctttttttcctgtgtggtgttttaagcatgactgcaaatatttttatcctccttccatcaagaggtagatctatgtcccctactttctttttctttttttttttttttttttttgagacggagtctcgctcttgttgcccaggctggagtgcaatggcacaacctcagctcaccgcaacctccacttcccaggttcaagcgattctcctgcctcagcctcccaagtagctgggattacaggcatgtgccatcacacccagttaactttgtatttttagtagagatgaggtttctccatgttggtcaggctggtctcaaactggcaacctcaggtgatccgcccacctcagcctaccaaagtgcttagattacagctgtgagccaccacagcagaccttgtcccctactttttatttgaatgggtccttggcacctcccaccaatagtacatttggaatgaatgctatgtaacttccaaggcagggtgcatagaaggccatacagcttcagcctagctctcaaaggacatttattttctctcagagccttcatgtaagaagtccaatgggttgggtgctgtggctcacgcctgtaatcccagcactttgggaggccgaggtgggtggatcacctcggaggtccggagttcaagaccagcctggccagcatggtgaaaccctgtctctactaaagatacaaaaaaattagcaggatatggtggtgcacacctgtaatcctacttactccggagctgaggtggaaggatctcttgaatcccggaggcggaggttgcagtgaaccaagattaaaacactgcactccagccttgctctgtctcaaaaaaaaaaaaaaaagtctaacaatcctgagaactccatgctctctcagctgagcccacccgtaagccagcccagcccagctgccagacatatgagtgaaaaaactattggaagtggatcctccagcccccagtggttgaaagcacccccattccagtcctcccctgaaagatccacctctgtgcttttttctaacttctgacccacagaatttgggatcacaataaaatagtggttgtttcatgccacaaagctttggagcagttttttacatcgtcatagacaacctgaagaactagtaaactctcatgttggctaatattcttgggctcccttcccccaggtgaccaatgccaggagtgtgtgacttgcagcacatgtgctgaaggtggagagaggtagcctctgcctcctcacactgcacatcccctcacctgcctccagtgtggtcagttcacataggctttcactcctctgcccaggcaaagttctcctctctcctgccacggtcctttgtttatatcgtgagtgcaggcttgtcacacggatagcaaccagattatttatgtttgtcttcactagactacaggctctaaagggacacagctgtattctatgcatttccctgtgctgaggcctagcacctagtgggcgtgaaataaatacgtgtggaatgaaactgtcaaagaccatgtgaccagctggccctgaccccctgctaacaagcagcagacccagaacccctttctggttctcctccaggcagggcacagttgtttcctatctgagcaggctccatttgcttcacatcagcccaagaacagggaatgggaaatgccttgtgctgcaggagggaagacaaagtaagccagagagcacttggccatctggggctgggagcggaagagaatggaaccattctggagagccagacatttgttttgtagttgttgcctttgtgaatgtacatgtcctgaaaccctggttaattttcttgttcaaacattggtttaaaattgctggctctaggagagatactgtccttcagcaggttctgttataaactttgcaactccaaggtctgattcagcagcaagctggaaaagttcctggttgctaagagaccagagagcaaattagcagctcacaaaagacccagctaagaccagtaaaaaataagacaaacgaaaacaaggtaggaaatgggcctcctcaaaatcaaaataaggtaaacaaactggctaggaaaatgtctgattggaaaagacaattataagtattcttcatgctgaagtaaaatgcactataggtagctaaactctatctttgtctttttgtcacttgaagaaaacagcaggggagcccctttctagtcctgaaattccggatctatgagtcagagggaaaaacaaactgtcccagttgataaggaggaaagaaaaaagtgaaataggctgcctcttttatgagctctccctgccaggacggtgaatgggctacctggggtggtggcccagaaacattcctgcaagcaaacaaaagcctccccccaggaaaggtttctgatcactgctggtccaaggctcagccgcaacagagggctctgacccccacaggacttggccagacacttcaagatcccatctggcaatcaagcatgagaattcaggtacttgtaataagaaggggcaaagagaaaagtaccaaataggtcccaggtattaaatatttattttgttaaagtgcctctatagctatgatttttagtaatttcttttctggtcagacaatctagtaaaatattatattaaaattatttttaatcaaaaacagaaaaaagcatgccaatcacttacctctgatggaaattcattctccaagacacacagttttcctaagaacctactgcttagctggacaaaatagtaggaaaatgctccaagtggaaattaccagcctcttgagggaggagcttgaaaatcttaagtgatcacagaaaagtcacagtcatctgggttttggagaccagagaagaaatgaagaagggcaaaaaaaaaaaaaaaaagaaaaaaagaaaaagatggggtgtggggaggaagatggggaaacatggagctacaaattgggagaaaattaaggcagccagtaggcatatgtcagggagctatggcgtgatatgcctaagaactatgtgactgaatagcctccacttatcaatatttgttggacagcaaaaggatttcagaatatgatggatccaacaagcatgaaataatctttaggggaaaaaattacaattccccacatggcagcttccttcagatcttttctgacaatcctgtttgtcagatttctaaatcgcatgcaactgctatattttaggcagagctggtatcttcctggaaaaagaccgtcccaaatattcagtgcccctccctgcaggagaaatagacacctcctttctgatatatgcagctctggccaaatgacttgctttggcccatgaaatgtgagcagaagtcacatgtgtcactttggagtataagttttaagagctagcacgtggttctctggcttttctcttgctgtcacaatgaccagaacatgttccagatagtgccttatccaacaggcttggtccccaagagaagaaagcatggaacagagctgtggctggattgcagtggacacgtagcccagatgaaaaataagttctgttgtggagttacctgcaattgcagcaaaacctagcctatgtgactaatatacatggcccacgggactaaaaggtggccagagttgcccctcgccctcattcacattttctcactagctggccacagtctcaccttgagaggaaagtcattatgctccaggtggctttcttagaattcagatatgttgcctgactgacccaggaaatcagggctggcagccctgctgctgagcgtggttcagtacccaagaaacaggcaaagatggcgcacggagctgagaggagacagaaccatgaacttcgagttggaaatgccaggttggagctggctcaccagttctaatttaacccaaaaagaacaaacaaaaaacaaaacaagcaaacagaaaaaaaaaaaaaaaacactagaccttcttattcctacctttagaactttagagagtgttgatatttaaaaaaaaaaaaaaaaaaaaaaaaaggcaaacaaacaaaaaactgacccccaaagccaaaagaaataacatgtctttattgaagaaatgtccattcttccttcaaagcctctttcccttaacaaacgtggtatgcacagcaaaatggaaaagatgtcagcctccacagtacagaggaggtgagaagatctgcttcccagcacactgtggaaaggcagggcctggagcaaggctgtgacctcagctgcacatctgggtcctaagaccactggagggagctgtgctgagtcaaggttagagagcccttggcaagcagatccccggcaaggcagccaagtcaaagaggaagtttgaacacttaatgggacatcaaatgggattttccctgcaatctcagaacttctgctaaaagccctaaagtggatagcaataagtaaaagtgcccccgcagtctaaaaagaaagtgatcagaggatacctgcaggattttctcaaagatgagtgatccaatcctcccatcccacctccaccaccccaagagaatactagaagatttgcgagtccattgaaataggcgcatttctaagagtagggagttgtcagcctagtaggaaaggctagggtgtttctccatccctccctttccccatgaaggcaggaggaagatgtttctcccatcctcaagtgaggcacaaagatccaagagaacagcagggaggtcaggaggccttcgagagggagagagtgagtccaatacccagctgggtgctggctgagccacagaaaccagtaggctgacatggtgctccccagacaggagcttggggcttgcccttgcccccaggttctggaacagggaggctggcacctgctttttgtccagagaattgtaaaggaatgtaggaagctggctgggctggcttgcagtggcaagtacagagagggcatgaggtgggcatccctctcatctgggccacgtgaccactacggaatgtgtccctactctaggtctgataagacttcctcctaaaagggaagcccaggaactagaggcaaggtgtgggggaaggtggtaaaaagcagactaggccacctctccaaggcagacctagctcaggcttgagctgagggatggggaggggagaagcatagtgctgggtatgagattgaagttttgatttagcccggccacgacctttcaatgcttgaaagtgaggtgaggcagccaaaataaaactagttattataactgaaggtgaccaaaaagctgtgggctgtgcctgaaacaacgtcaagggatggtccagaaataaggaagagaaatgcaacagagagctagaaaacaatagttggagaaaaataaagccacctcctgattgtactccatggagtcacatcggtcaaaaaaccaattacaattggagggaaattcaccagagagagaagtgctgtctagagagtaactatgattggggagaactgcccaaagacattccattctccatctcattagagtatgcattctccagggtgtgaatgctcccaagtgctcccaagggggtggaaattggctggggtgggggtgtgaaaaatcttagatgtttcaaagttttatgaccctccaaagtttaatcctgcccaacaaaatagtatgtaattatttcttaatttatgtttactatacatttatttatcaatacatatcttatctctctataaatttatattattttatgttattatttaaaatagtgtttaggatagggaaaaaatgaaaggaagggaattttttttccttaggggaacaatgctgaagaaaagtctagaaacattgagttagagagaaacacaacattcaacctcaaaccagaactggtgtttggataaaatttttctggctccaagtagaattgctttcactgaatttgttttgatatcctaccttttgagggctttatcctctgcttcacaaggtgtccttttcatagggacccagaagagaacgttctttcaggtttcactgtaaagaaaagcagtgcttcttctggataaatggtttgtttatcttttatgttttatcttttatgagatttgttatgcacatctcaaattagatcaagtttccctctttgcttcagccacaggggagctcagggcaccttttgtaaccactgcaggactgggccatatgcatatctgggactttgccttatctgtgcttttagtatttttctacttttaactttgccccaattccctcaactgtgttttaactctttcctatttcatgtatttttataagccccctacaatcctttgtggaatatgtgggatataaatatgtaaagaggaacactacctctccttccaaagttttctttccgcccactcttattaagtctgtccttatacagttgcttttctttttaactcaatgcacaactaaaaggtattctattgggttttatctttttcttagttttccaggatattaagatcatcttgaaaactgattctgtaacccaacatgtttgccaactttgtgttatccatagtgttgaggaccatacctcccatgtcttcatccaagtcattgataacaatgttgaatggaacagggctaagacagacccctaaggtatgccactagagaccttcttccagccaatatcaatgcactaatcccctttctcttctgatatggttgaaccaacgattagcccaccacatttctgccatctgtcttctggctaagctacttggtcaaacatctctctgaccaaggagcctctgcctacagcattccttagacctgttactcttaatatcgctccccaaaaggaagtaggctgacactggatgccgggaactcaactctactgcaattgtgtggctgccacctctgcactggaaatttgatactggatcccaaaaataagaagcctgagttgccagctgcatgagtaaaatgaatacaccacccagagctatgtgtttccaaatcaaagtctaatgtaggttctcctcaccggtggagcctgggtcacatgactggcaccagctgcaaaaaatactaaaaatctcagttctctggattctgccttggagcagcagttcccatatgtcaggaactctaacaaggattagaatgatgctcaaaaagtgctaagcagtcagacatgacgaatgtccctagagcccaaatggtggggggacatggctgcccaatgagcccaggctccatcctgcagttctcagacccttctccaagctcctaggagaggaaagccagtgggctaaccttggacggggtgctttccagagacagtctcagctagtttgcaaggggtcaggcagtgctgtgaaggctgtcggtgccctcctgatgtcccctcagggcatttgatcccctcctggtgtgcttccacctgagtcagcaggcacctgagtctctgtgtcagaggactgttctcgggcagcctcagccctgggaattcacatcccctaagacaaccctcaatcaatatgattgacaacataaggattaaacattctccagccttctccatgatgaaacaactctgaagtgtgacttacaccattaacagacatcccctgtgggactcttccaaagttaccctcggggacactttgcttcatactcacttctttcccttctttcttccagttccctacgacctctggattttccctgggaacacacttcctaacactttcacacaaacctttgcctcagggtctgcttctggaaaccaacctaaaacaggaaaccatggctgccggaagtccatggtggtaaatcgggaattactagagaaggaatgaagagaagaccccaaacgtgtccgttgtccccctggttggaccccctccagaccaccttggttctgaatgtagaaacttaacctctaaatatctgcccaggccctgccctggtccagaagcagagctggaactcaaaaccagttttgctgaaggtgtgcaccttcccaacatccactggtgagaacatcccagcacactgctctgtaacttccagaattcattcctttcccctttttgaatgtcaagagctcatatgcccatctcatgtcattgagcgcaaatccctcccctataatttatcaaagattgatgacagtgactctgaaatctcatgtcaagtccctcccaggctgcacgacataattcatcagggtcagagccctgagtttatcacagctgctgctaccggctttactgcctcaatgcctgtccttgacttcaatcccctctttgcaatgtttgttctacccttttcaattggaagaccactttccttactggaaaagaaggaggtaaaatcatagttaggcagcacagccctcactttaccttcggcgaatgttaaatcattttctccacgcaaatctttcccttaatttttgcatgtagaacagagaacaatggggttcctcagagagttcagaacccctagctcatttgagacagtagattttcctaccccacttcttacaggtggggccacactgctggattcagcccttgccctctgtcacttaggggacgctgaaggctgttttacaaaatgtgaaccttcatggccacttctgaatcctaagccaactgttttcggacccaggctgcttcttctcctgctgacagctgtcactcctttattcccaaccacctctctacttaagagcctgactaaaagtttttttttttttttttttgagacggagtctcgctctgttgcccaggctggagtgcagtggcatgatctcggctcactgcaacctccgccccccaagttcaagcgattctcctgcctcagcctcccaagtagctgggactacaggagcatgccaccatgcccggctaatttttgtatttttagtagagaccaggtttcactatgttggccaggctggtctcgaactcctgacctcctgatccacccacctcagcctcccaaagtgctgggattacaggcgtgagcgaccgcgcccggcaagagactaaaagttcttaattatagtccctggcccatactttgaattctcttggcttttattcctgagggcaggcctcatgaaatcacccctttccatcactttaagggaaggaccatcctgcctcatcctcaggaagtaacatttttctgcaaggttagccaccaacaattgcctttagggtcatcaaatttttgagactctcaagcccagaagatgccctggttccctggcttctaagcctcttgcgtccctaatttcttactacaacttacccttccattcttgcactatttttttctaatctagctataagagagattcacttagtttctttagctaaatttccatttttcctcttcagctggatcaatgctattttaaaacaacaacaataccaggaagagtaaatgagaatctaacgaaaatagttatctgcagggtgtgaatagaaatgtagaaatgtagcaaaagggctagggatcggagggagacatcttctagtataccgtcttatatatgtttgatttttcaatcatttaaatgtttttacatgtttagaaacaaaattaaattaccaagagcgaaaaaaaactaaacctaaagatgagttttaacaaaagcaaatgaaacctaattctgtatcaaatcatatagaaaaattctaattcaaagaatttgggacacagtaccctgactatacacccttaatggaatatattctaaagagaataaacaccacaaagatgccttaaacctgactgagtaggtttgttcttagtagtataactggtgcagtaactctgaaatgatttgtgtgtgttgtagaatagagaaagttaatgaatatgttggcattttgagaaccaagttctcactgtgagagaaagaacacatgaatagggattgtgggaagggaaggaagaccctggggtgttggatttgaattggaagtatcaaagtaaatacaagatttctttttttgaaaaagtatttgctagctctatccactgaaagagcctagaaataacaatgctccaatggaatgagtgcaccaagcacccagaatttggttttttaatagtgttctccattgaaaggagccaggagccttgggagaaatgactgatccgattctggagcagagacagtacagggtaagcctaggatgtcaggttgcgctaaaaatcaagaaagtgctcaaattctaatggtgacatgtcaaaggagcacgggagccaaactgaaagggctcccaccaggcaaattttggacaatttgagttttaatatttgtaattaattatgacacatggattttttttaagttccccagttcatggtgatattcaaaagggtggggaaactcttcttcatgaaagaatgcctgttaatgaagtagaatgatagaattagacaattaccattttacaacgtagtgagttactcggctaagaatcatcggtgtattctgttaccattgaataaaaggttggtgagatattcatgcagttcaaatataaccccttcagattacttagtaagtaaaaaggggcaagggtgcaatggagaacagtggtggacaccacttaaccaaatgatcaaactcagcatctaataacgggaccaactgacatgaaatggcagccaatttctctacaatagaaatggcacggattcttcaaaaatctcaggaaggaccgagcacagtggctcacgcctgtaatttcagcactttgggaggccaaggcgggtggatcacttgaggtcaaggaattcaagaccagcctgacatagtgaagtgaaactccgtctctactaaaaatacaaaaattagccaggaggtggcgcacgtctgtggtccctgctacacggaaggctgaggcaggagaatcgcttgaacagggaggaggaggctgcaatgagccgagatcatgccactgcactccagcctgggcaacagagtgagaccctgtctcaaaaaaaaaaaaaaaaagaaagaaagaaaaaagaaaagaaaaaagaaagtcaagaagaattttaaaaaatgatctattctagactcaaggataataaagacacatgcaatgcatgatccttgaatcaaggagggaactacaaaggacattgtggggacaatggaggatatttggatgtggatagtatatgaaatagtgctatatcaatattacatttcttgaatgtgatatggtattgtgaaggagagtatctttagaagagatgtgctgtagtgtttaagagaaagtattatgatgtctataacttaaatgattcagattttttagaaatatatatatgctaggtgtggtggctcatgcctgtaatcccagcattttgggaggccgaggcgggcagatcacctaaggtcaggagtttgagaccagcctggccaacatggcaaaaccctgtctggcaaaaccctgtctgtactaaaaatacaaaaattagcccagcatggtagcacatgcctgtaaccccagctactcaggaagctgaggcctgtaaccccagctactcaggaagctgaggcaggagaatcatttgaacctaggaggcagaggatgcagtgagccgagatcacgccattgcactccagcctgagcaacaagagcaaaattccatctcaagaaaaaaaaaaaaaaagaaaaaagaaagaaacatagataaatagatagatagatagatagatagatagatagatagatagatagatagatgatagatagataggcataggcatagatagagagagagagacatggctaatgtaagtgaaacgttccaggtgttcatcgtactcttctttcaactcattcatagatttgaaactttttgaaattaaaaattgaagtaggagaatgctctggcttcacctcaaaccatttaagtcaaaatctctaggggtcagcccaagtttcttttatagcatttctccagaagtgtttactgtgcatccagggttgagaactactggcctacctgattcatgatgatgtccaggccctcagaccctgcctcagcccccaaggaccctgaaaataagtctcttaaaggtcacaggggcatctgagtctccagcaggcccttgcagccctgagtcagtagcccaggctaaggaggagagagtaaagagtcttcatagaagtgtctgcttagcataggaaccctgactgcttttaggtccttctggcttcctcctgccaggcctctcccttctcagaggcccctctgagataaccctcattctgccccttcaggctgcctctgaaaacctcaggcctctcttcctcctcccttgttcataaggcctccagcaagggaccttgcatggcacgccctcaataaatgagtgccaggtgagccgaggtgggctcactcacactgtgcctctctcactgtcaccctcaggggggaggaggaaaagcccatatcaaacatgggcaaagggttttactttgtccaaaaaaaaaaaaaaaagcagaagctgaaggtcaaagaagcaaagagagtgggaaggactctgttctttacaaagaacagagtcatgacacctcacactggacccttgctaggtgtaggtgctgtggccgcactgaatctgtgttatctcataaaatcaacagcctagccttatggggtgggtcatactgtcattgtcacttcacaccatgtgtccccagcatcacacagctggaacctcagcagtctcggaccaaagcccacacctctagccatggtgctagactgcctacataggacttaaggaggagaaggaaagcaagagccaatattgatgaggcgcctactaagatgatcttgttgaattctctctgcagccctgtgaagtcaatcttatcttcttttgatgaagctgagcaaatggactctgagataaagtaatttcattccatcatgttgaacaagcctaaaatgtatcatgatctgcattgtcttctgtatgaatggcaatctctggagttgtgcaacccaggatcaagagtgacttgcccagggctatgctgccagtaagggatggtctctggatttggaagcaaggtctctcagactttggcctccctggaaaagccctgctgtcccctcacccccaccacctcaagtgttctgttaccagacatctctccgcagggatcagaacctcccttctgcagggagaagtgagtcttccactgcgctgccatcaaggaggtgtcagaaccctgagctcttctagacagacctcagctgttgaacatgtgaagaacatgcctttctgcagatgatgaagtgggatgttggggatgagaaagcagaggcagaaaagtctgaggcatgccccccacaattcagcagactgtggggtagtggcactcatagctaggatgaccagctcatcccagttttctcaggactttccttgttttagcattgaaagtcccacatccagggacaaccttcaatcccagtcaagggagatggttaatgtcttggtcagcttgagctgccataacaaaatcccatgatggaataaaacaacagacaaatttctttctcacagttttccaacatcgaggtgctggccaatttggtttctgttgaatgctctctccctggcttgtagaaagcatcttcctagcgtgtgctcatgtgggctttccctggtgtgtgcacatggagaaaaagtaagaaaaagagggagaacaagagacaggaagaaagagagtgcgctcaggagaatgctccaacgtctcttcttaaaggacattaatcctgtcatgggggccctaccctcatgacctcatctaaccctaaatacctccaaaagtctatctccagatacagctacattggggtttcaacatttggattttgggtagacacagttcagtccacagcagttgaataacctacttgcagccaaatccctcttctcaacccctggtccccgagatgcccaaggggagaaggctatctattcttccagaaacccactcagccacaacagctagtagatgaataccttgcactggagtttctggttttttccagattccaggcctaaggaaccctaagtggtgcctggctttcgtttccaaggcagagtctcctaagagtgggctgggtagggagggtgatcctcaaaactcctagttgctatggataaggttctgagagaccacacatctgtacacaaagtcacacccaaatgcttcttttgtgggcctttccagatgccccagtcaagagggagaaaaggcaaggaggctgtgcatagaccagggctagaatcctggctaacactcacagcctgcataacttccccgtgcctcagctttctttcctgtaaaatggggatgcattataagggttagaataaaatgggtttcaagtgtttggcacctagtaattgttcagtaaatggtaatcatctttatttctctcctgcctaccttgcattccctccattccccctcccctacctttcccattttttcattcattcaacaagtacttattgaataactactatgctgtagtcactggggatgcaggagtaaataaaacagtttctccctccaagaaacttacatcacggcctgaaaaaactaaaagaaaaataaatatgaaaataaatatgaaagtgacattatgtgatggttcactttaggtgtcaacttgactgggctaagggatgcccagatctttggtaaaacaggatttgtgggtatgtctgtgagggtgtttctggaagagattagcatttgaattggtagcctaagtaaagaagatccgacctcaccaatctgggcaggtatcacccaatcccttgagagcctggatagagcaaaaaggtggaggaagagcaatgtccctcctctccctgagctgggacaaccatcttctccttcctttgaacattagagctcttgatccttgagccttcagactccaaaacttacaccactatccttccttctccctggtttgtaggcccttggcctcagaactataccactgggtttaccagtgaattattatttaccagtgaattataccactggctttcctgggtctccagcttacagacagcagattgtggaacttctcagcctccaaattgcgtgagccaattcccatgataaatttcctcttatatatacagatggtccccaaccttcaatggatcaacttataatttttcagctttacaatgagtttataggggtgtaaccccatcataagtcaaggagcatctggacttataatggttcgacttttgatttttcaactttacaagaggtttatcaggatattaaatacattttgacttacaatatttttgacttacaatgggtttaccagaatgtaggcctattgtaagccaaggaacagctgcatctaaatatatcctattggttctgcttctctggaggaccctgactaatacagactacgatagaggtgggaatggaggccagaggaggcaggagagtggatgaatctgcagcccagattcatctagaatggataaatggaaagggatgaaagggatggaaaaagatggaagccaagagagaaagagatcagaaacataaattttggaaccatcagagtcaagatagcctttaaagccagaagtagatgagatcaatgagggagcaatggtagacagagagaacctctgaggtctgcagggctccaaccttcagaggttgaggagacaaggaaggacccctaaaaaggggtcacagctagagacaggacattgagggagagggcatcctagaagtccacactgcagaagatctgaggggaaatgggaagagaggtctggagagagcagtgtagacagctcccctacagtggagtgtgtgcctgggagtcggcatcccagctgcaaggagaagccccaaacggtatggccatgtttcttttatctctgggtctccccaacacacagtaggttctcaatcaaaatctactgagttggcatcagttagatgtcctgtttatggctgaggcaaagtctggagatttcccctacctctcaggccctcgctgcaggcctctgacactccagggatagctggcaagcccacaaggcctccctgagggtccttctctctcagaaaatatcagcacatgtgtccagcagggcctttgatggcttcacacaagaggagagtcatgtgtgcattcctggctctctggacaagaaataaatgttcaggcggagagggagaacttggctgaagtggaggagggaattgaaatcactgaacaaaataacagcaacaccaataacaaccatttattgatctcctgttctgtagcagacgctaggacaaatgcagggcatttgttgacattgtctttcatctcagtccagttcagtccatctccagttacctggtgagggaggggctgcaaaccccaccctacaatgagttaccctgctgcctgaggccacatacacagtagctccaaggctgatgttcctcaaccactgtgtgaagatttatcattgaagaaaggagagatggaggtaggaatagcaaaggctaaagacaaagctaccccaagcagcagcatctccttccatgacttcaactccactgacaccaggctgacctgggctttccctttgcctttcccaccatcacctttgctagctggtgggactttcaggccaatgggttacatgtttagaaacaaaattgggcagtgggctggggccagcaaccacagaaccttcctcctcagccattgtcattaagtaggcagagatttcctgaccttgtcagtagccctctattagtccattttcatgctgccaataaaggcatacccaagactgggtaatttattaagaaaatgaggtttaatggactcacagttccacatggctggggaggcctcacagtcatggcagaaggcgagaggcacatcttacgtgacagcaggtaagagaggaagagagccaagtgaaaagggtttccccttataaaatcatcagatctcatgagacttattcactaccatggaacagtatcagggaaacagcccccatgattcaattatttcccactgattccctcccacaacacatgggaattatgggagctacaattcaagatgagatttgggtggggacacagccaaaccatatcaagcccctcagccaacattttcatggtggcagctgctcatgaagtgtaatctaaaaggacataaaaaacattcatacacacatacacacacacatacatacatatacacacacaaacattcatcacacactcaaaaaatctctcccattggctcacctcagcacctgaaattctgccaatttaaggtcctgtggagaccagagtagttgttatgtttatcaatatgtgtatactcactgcacttcagggaagctggagtttaaaggctggaggactaggaccaaagaaagaacagttgtgctggtggagagaaaaggaagtgagacaagctgagccttgccagagaaaaggcagccaggatagtgcagaagagggaaaggtggaggctcccgaagggatggaagccaagcatggaagaggaaaagagtcgggtctttttctgctctcctaagagttctggtttggtatcgtggttgcgagtgtgagatcaaacaaccaggccgggagcagtggctcatgcctgtagtcccaccaggctggtcacctgaggtcaggagttcaagtccagcctggccaacatggcgaaaccccgtctctactacaaatacaaaaattagccaggtatggtggtgggcacctgtaatcccagctactcgggaagctgaggcaggagaattgcttgaacccaggaagtggaggttgcagtgagccaagatcacaccactgcactccagcctgggtgacaagggcaaaactccatctcaaaaaaaagaaagaaaagaaatcaaacaaccaaggcccaaatcccagtggtgtcacttgctaattacgtggcttaggaaattactcaatcctcctatctgcatccttaaaatgggaagaatgacagtacacatcttgaagggtgatcttgaggcttcagtgaggtaatccatgcaaggaccttagcacagttcccagaattgaataaacacacagtaaatgtttaatattattattaatatttaactgaagtctgcggcctgtttccaccatcagctcctccagccatgagttggagtctgccaaggattttagagttcattgattctctggatgtgaatcattgtaaacagatagattggtgtcttctgtttggagacaatatctccccttcttccaatggcagaacatctggtgacttcccaggagataaaagggtggagtacaataaaggccagaaacctggttctccctgagggagcagaatgagaggaataggtcccggtggcatatgctgctttccttgaccttggcacctgttccaagctggcagagtgcagaggagggagcactggggacacagaaattggtgtaactcctacagacagcaatgtgctcatagctcaaaattttaaacgcgtgtccccttgaccctaaattttggtttctaggatttttttttttacagatatgcccccacatacaaaatgatgtaaatgcaaagttattcactgcaggatttgttatgacacagagactgggaaaaaaatctaaatgttcacactttactgaatatattatggtccatccatacaatggaatattatgcaacagtggaaaactgtgaagaaatgtctataaactgattatgaaaagatctccaagatccattgttaagtaaaacagcagggtccagaagaatgtagaaaaagtgagaaaaagtaatatgtattcaatatgcatagactatatattcaatatgtatagaataacaccaaaagaaaactcaagagatgataatattggtctctgaagaagggatccaagaagccaaaagacaagatagtcactgacttttctttcatatattttgaattttaaaatgctgaagacaactaaattttgtttacaagcacgggacttggagtcagacagacccaggttcaaaacccagatccactggctatgtgatgttgggcaggtcacttcagatcactttaatctctttgagctttgtttcccatttgtaaaacaaggatgagaataatacctatatcacagggtggttgtgagcattcactgagatggtatttttaaaaatatcctatgtggagacaggcatggtggctcacacctataatctcagtgactcaagaggctgaggcaggaggatcgcttaagcccaggagctcgaggttgcagtgagccaagatcacaccactgcactccaacatgggcaacagagtgaggctgcctaaaatagaaaacaaaacaaaatggggaggtagctacagcaaagatgacttttaataaatttttgatgaatctgcatttattcccttctatatgcccaggagagcattataaggtaaggttcaggattgccagtagatggaataaagagaaatgaaagtaaatatctatcttacaaggagtggagggtggcaggtccctcagtgcatgtgtgctgaggaattcgcatcactcacatgtgctgaagagtccatccagctcaccgtttataatgccagggtttgcggggggcagtccccatcaccaggtcattggatcctcactgaggaccctatgacatgaacaagctggagactcctggtgccattttacagataagctctcccagggagctgcatgatgggcctaatgttattaatcgaacagacatgagtggagaggcagtaggtcagtgtgaagtgagcataggttctgggaagaaaacaagttctggttggccatttaactgtgctgagcctcagctcctgcagccacaaaagggagatcataacaccagctgcaaaatgttgtgtgaatcagagcttcaggcactgtgaccaagacacgggaaagctcagtcaatggaagctatgattatttgtgtgggattatgattggaggaaggcagtggggctgtgtgcccccaaaagtgccttaaccactcaaaaacagaatctctgccatgaaggagttcacagtctaataagagaaagagacagatcatctctattcaataaagttccccctaaataaaaatatggtttacatcagttagaatgacgatcattaaaaagtcaggaaataacaggtgctagagaggatgtggagaaataggaacacttttacactgttggtgggactgtaaactagttcaaccattgtagaagacaatgtggcgattcctcaagaatctagaactagaaataccatttgacccagccatcccattactgggtatatacccaaaggattataaatcatgctgctataaagacacatgcacacgtatgtttattgcggcactattcacaatagcagactttgaaccaacccaaatgtccatcaatgatagactggattaagaaaatgtggcatatatacaccatggaatactatgcagccataaaaaaggatgagttcatgtcctttgcagggacatggatgaagctggaaaccatcattctcagcaaactatcgcaaggacagaaaaccaaacaccgcatattctcactcataggtgagaattgaacaatgagaacacttggatacaggaaggggaacatcacacaccggggcctgtcatggggtggggagcggggagggacagcattaggagatatacctaatgtaaatgatgagttaatgggtgcagcacaccaacatggcgcatgtatacatatgtaacaaacctgcacgttgtgcaggtgtaccctagaacttaaagtataataaaaaaaaaagaaaagaatgttcaaaaaaaaatacggtttacacaagtgtattcctgtatatcatggtctcattataggtgtagtgccaggtgttcccatcggccatgattaaaaatatcaagaggtgggtgtcaaggagtggaagggtgggaaggccggaagcaaagcagagaagtttgcaaagatccctgcaacgataaatgaagatggggaggagtcaaatggggcctccaaggagcttcctttgcgaggcattggtgaggagggagtgcagtgagctgtgtacgagaggctgaagcagggacctgggcctagggcaccacagcaagcatcttagggagggggctgacaactgcagccccaggtgtgctgataacatcacatgctagtcctactttcctactttatttttcttgcgaaccttaattattccagagactgagtcaacaaacaaccctgaatcataaagtcaaaaggccttcacaaaaggatgctgatattagcacattgtgaacttactctgttgggaatgcgatctttcagaacaacccaggagcagggtactattttcatcccacccttctacagacgaggaagcagactcagaaagattcattcatgtctgaggtcacacagccagccaggggcgaagccaggattcaagccaggtgtgtctgatgaaaacactcctgctcttcctcacttcactgtaggttttgaacatactttttttgctgctgtgaaggaaaataaatgcagatgtggcagcagtagtatatgaatctatgcatgtgataaaacgtcatagaattatgtacaaggcatactaaaaaaaaatgagtacttgcaaaaactggggaaatccgaggaagatctatgatctagttaattgcattgtgccagtgtttgttttctggttttgataatgcactgtaattagtcagatgtcacctttagggcaagctgggagatgagtctacagaagctctctttttgcaatttcttgtgagtctatgcttttttcgaagtagaaatctggaaaaaatacatgtagaaatctcctgttgaaaatacaaacagggccagagtaggaccaaggagactcaacagctcctagtaagtaaagaacagcaccagggcattaccagggcagtaggagccttcattccaaacgttaagaattacaaaatgatacagctgcccccttacttacaggactcttgtatagctttattttagggtaacccaagttttccagattcacctggctacagggggggctcacctttacagatatcactcatgtttcaccaatctttcccctccttgctatgacagagcttccagcccaccccaaacctcacccacccagtcactgctggggccctctggaggtgtctcacacaagcctactggccagatgctgtagtctgctgctcacctgctaccctgtctgcaggtgccctctgtgcccagaaattccagggtgttgcgtcagcagggcccctgtgccaggcacagaggtgactagggtctgtgcccaagaatggcctctggatcttagcaaaccccaacccaattccactggactcccctggcctgaagcttctctgcattccacacagaaagtgggtggatgcccactgaaggtcaatcttgattgcctggcaccaaagcagggcagcatatgtccaacagagccctcatgaaaactgctcccaaatcctccactctgaggtttagagatgtgtgcaaggttttgaaacacaaatgcagttacagtaagagctaacatttactgagcatttactatgtgccagaccaagcaattcacatgggtaaacttgtctaattctgatagataggtaagctgctgccacaaagagacccatcaataataacccagtggcttaaagaagatagaaatgtagttctctctcacataatctgagggagtccccctggtcagcagcagctttgcttcaggcagagtccacggcccaggttctttccatcttgtttctctgccatcccccaaaacgtcctcagcctcatggtggcagctgggtcattgccatgcctgtttgcagaccaggaggagagaggcagcaggcacgaggcatgctgatcgccccacatcactgggcctgggactctcatgcaccactccactcacattctgctaatgagaacattctgcaggtgagaacttagttacacaggctcacctaactgtagggagtctggggagatggggatatgtgtgcccgagcaattcttttacagtgaaagaagagaaaatgtgttctggtggaccattgtccctccaccacacttcctcacaggtatgaccaaagatgttcagaatggttaaatgcttgccctaggtaaaaactatctaatctgataagttaattttaaccagtgaagtagacctggacccctttcagataaaatatgcgttttgtgtgttttaatagggatccaatggagatgcaaaacttaacccagaagcatagctctagcgggagatacagggtcgggggtttggcagggctttttgagtggcatcatagtccgggctttagaacggggagtcttgaatgagtccaggtccttcatatgggaaaaccactaaaaatctcagccctcagctctgagacagaatccagggtgataatggatgtggcacagctagtgagctgcaagtggctgtcacatgtagggggttattttttatctaaggggatctgcacatcccaccaccaaagctgccttttgggaaggtaacaggtgaccctgtccaaggtctgggctgaggatgaacaagtttccaaaggtgagctgcaaggagcttgacaggagtgtgtgtgtgtatctgtgtgcatgtttgtgttcgtgtgcacacatttgtgtgcatgtgtgtgtatatgtgcaaatgcacacgagcagcttcagccagctgagcagccagtcatttattcatatggatgacttgatttttgattgagttaacaagtacttattaaacacagttttgcaaaggcctgcagtaaattggaagctatacaggaaccctataagtttttacaaccctgcattcttcaaatattggaataatataaaagataagtagggagtaagaggaaggaagagcaaacactagagaaggaggagccatgggaaagtgggttagaagagaaggaggagggttggttgtccttctggtttcgaagcaccagtgggtccattcaccaatgaatacaaaccaacctattgtgcaaattattaaactacatcatctgtcctagtctgagctaatattcactacaatggctcatgttgctgagtgcttactaagctccaggcactatactaagtgttttatatattctatctcatttaaccctgactaccctgaggactggcactattattgtggctctgttattagcctattttatgggtgcagaaatgaaggcagacagatgttaagcaactgactcaaggtcacacagctagtaaactgcagactcaggcctgtctgattcctaacctaaccaccatgtctaacacttgttgcccataggcctcagtctcctcgtttgtgaaatggaaccactacatccagctttgcttgccctatgggctgttgcaaggatccactgagaagtgattgccaaggtgcactgtgaacttacaaaacctaatgtaaaagaatcaaaccacattgctccaagttttgctaagatgaatctaccttaggatcatctagagaataaaacagttactagcaaccaagattaaattaagcctcctctgtttggaaacaactttagaggaaggatgttgttgatttgcctggcagagaatggttccaagcctaagagctcacagttgtttttatcccaaccgccttatcagaatatttaggaatcaataatgtagtggcatgctctgaggattctcaagaagtcctatggcgagccccacatgcagaaaaactaaaaacccctggtcaataatcaacaccaacttgccagccattgactgggtcactgtggaagtggatcctccagccccagtcaaaccttcagatgactgctgcctcatggagtccctgaaccaggaactgctcctgactccttgagccacagacacagtgagagattataaatgactactgtgtgaggccactaagttggaggggttggtaatttgtaatacagcaatagataattcatacagcacctatgataccttgtgacttaagtacaaggttattgggtattaaccaaaattctagttttcaagcaagagaaactattctggtacatgtaagccaaaggggaattttcagggagggcgtcagggctcatcaaatccaagaaaagactggagactcaagtgtaggatcctctggcaacagaactccagctccagttcagggagaggaacagccaggtttccacacctccatggctccagagagccactaatcattccacacatcttgatttagtccgttcagactgccataaagaataccaaagactgggtggctcaaacagcaaacatttggttctcacagttctggaggatgggaagtccaagatcaaggttctgacagatatggtggctggtgagggcccttttcctggttctcagaccaccatcttctcattgtatgctcatgtggtaagaagcagagagaaaagaagcaagttctcctgtgtctcttcttataagggcactaatgccattcatgaaggctccaccttcatgacctaattacctcccaaaggccccacttctgaatagcatcttattgagggttaggattttaacaaatgaattttgggggcacacaaacattcaatccatagcacaacctccgtgtactcactgaggattcagtgtctagagtgacagagacattgatcatgttccagccccctgactgcaccaagggtgagagaaagcatctgccccttggtattatttccctctgagacaaatcccactagggaaagatgattcttgaaagcaagtcatggtgcttttagagaaggggatgggatgctctgcagccaacatcaataaatgcccagccagtggtcattagatggtgttacaaagaagaaggccttgaataatactgaaccaggctacgtgtaggctgtgggctttatagtcattaatcctcacaataatcttaaaaggaggatgatattatccccgtcatccagacaaggaggcagaacctcagatacattaagtaacttgccagaatccacgtggaaagtgatgaagctggcttctaagttaaagtctatggggttccagagtccttacttgtcccacataaccaggcttccaagaagggcctcaagggaatggaaccacattcttgctttgatgaagtcaaataaattaaaaagagtttattaagggaaagagacagagactgaagtaaagggttcacctgatcttctcccaaggaagaatgtgcctgagtcatatctgactggcttgacccagaaagaagagggtagtcacaggcagaaaggaaggacaacacaggcacacagagacgggcggtctccagaactcaaaacttcccaagggtttacaccctgtgtactgaacatggtccgcttctgccacctagccacagatggtctcctcagccacagcacaagaagcccaactgtggtgaaagcctgtgggtgggtatgcagcaagcacaagccacatgtaaaggctttcctggtaaatttccaagatgaccaatgccactgagtcctcttctctgtcatgtgccttcttcatatttatccgagattcccagggacaggatggccagctcctcctttagattagggagggtgggtccttccccacccccatctatactctctgccccactaaagaacttttctataatcccatcttcaccatactcagcatttgccaaatattattcttcattttctaattgtgtcttttctagtttgtttggaaatgaaatctggtttcacctgaaggttgagagctaatatgaagcatattcctgcccttgggctaatatctttatgacatcatgacactaaccagctagaactgacttagtttttgttggccagaagccataacatctctgccaacaagaaactagcataggctggattaaagtcagcatgagaaagattacctgaagataagaaaataaatgaaggcccaccatgcttctaagcacatagtaaatagtcaaatatgtgcagaggagatgcataaacatatctgtgcaaggctttcaaaaggatcaggaagacaggtctcacaaaaaaagcatttccaggctttgtattttacagaccaatatttttgtgttttgttttttattttggggaggaaaatccacacaggattattatctttttactttaccaagtagagacattttaataaagctttaccatcctttcataagataatagacctgttaacacaagccaagtatgaagtataatcacagaataaaggacagtctttccagggaaaaatcatcggcacactggatacgggtctttgttttacactatatagtccctctctggctagtttaagcacaaacaatatattatggagcccagatagatagttcacaaatcactggaaaggctgtagggatatactccaagttgaattccatattaacaccccaaactatgccacgtaacttaccactgagggagctgctgccacagccgctgaccactctagctcctcaaaatgagcaccagctctgtgccctgttcagctccctccattattccaaattacccctccatattccaaatcaaagtcctgcatgagtcccagctgattggctgaacctaagcatatctagatccccatctgccaaggagtctgggaaacgtagttttagttttcagcctctgcagtacagggaggcacaggggctggagaaggcatggagtgaaccagttagccactgttggtgagctttttgtcagaccacagcacttctaaaacatgtcaaggtctaagcctgggttacagaatcacatttgggtgtactggcatgagagccatcctaaggaatgtgtgcagtcacgctttattgagaagattctgaaggtcagtggtcttacacaggcaccttatcaaggttctgacagatatggtgtctagtgagggccctcttcctggttctcagaccaccatcttctcattgtgtgcgcccatgtgataaaaagcagacagaaaggaagcaagctctcctgtgtctcttcttataagggtgctaatgccattcatgagggctccaccttcatgacctaattacctcctaaaggccccacttcctaataccatcttattgagggttaggattttaacatatgaattttaggggcatagaaacattcaatccatagtacatcctcagtctactctgctgccagaaccttgatatggcacctactgagtgaatggctgttcttaagaagggaatttgctgcctgaggctacagcatgaccacactctgactgtagtagacatctgtcatatttgtggcttctcatcaacttttgagtagctttcccgtatctggggatattctcatgtaataagtctcatctccctaatattgaagtcagagatcgagtcagagttcagagcgttcaggtgtctttgcagctaagattcagggatgtggtctgagctctcacaacccaaggcctccactagagatttgattcagaagtgagtagcataaagagcaggcagtgcacggagcttctgtttttgctggcatggaaggcagcagaggccttagctttcagaagtggtggtgaggggccgggcacagtggctcacgcctgtattcccagcactttgggaggccgacgggggccaatcacgaggtcaagagagcaagaccatcctggccaacatggtgaaaccccgtctctactaaaaatacaaaaagaaattagccaggcgtggtggcgggcacctgtagtcccagctactcagaaggctgaggtagcagaatggcgtgaacccgggaggtggagcttgcagtgagccgagatcgcaccactgcactccagcctgggtgacagagcaagactccatctcaaaaaaaaaaaaaaaaaatgtggtggtgaggtctggttcctgcctcagaagtagcatcagtggtggtggcaagagtggctgcaataaagtcaagttcctggtgtccagtgctcagtagcagcagccatagtaataccagtttccctccatgatctagccctacagcacagtttagggcattgttcttggaaactttaccccaaatctatttctccaccctccaaatgattgtttgtccttcagtttcctttattaaatcccatctgcctcaactagccagagtgaatcctgttgtcagcaaccaacaacccacttgatgtgctagataagccaggaacactgaccctgaatctactgcctctacaccaggctgcagtgtgaaccatttctgcaacagagagtatcggcctgaacctcatctcccattgccttcttgagtcaggtacaaagaaggatgggaggaaagcgtacttccttctgactcccagctttccaggagctcctacagaacaagaatgtttcttcttcactggattgttatcaccaacaatttgtgcagggcttagcacagagtaggtattcagcaaatgtttgacgaattaataaataagtgaatggtaaaaacactataaagttatacccagctggattcctaacccagatctgtgctgtccattaacagtacccactagccacacatggccactaaacaactgaaatgtggctagtgcaattgaggaactgaatttttattttatttcagtgaactaaaatttaaaaactgatacctaatcccatttttggaaaacttttggctcatttgtgtatgtaaatgtacattttagctataaattgtataaaagctgaatacagatgaaatctttccaatgaaaaattagcatacaaattgagatgtggtgtaattgcaaagtatacaccagattccaaataatataaaaaagaatgtaaaatatactattaatgttatattgattacatgtggaaataatattctgaatatattaggttaaatgaaacattaaagttgacttcacctatttctatttacaatttttgatgtgactactagaaagtgtaaaattatatatgtggctttcattgaatttctgttagcacagatctgaacattagcataaatattgctcagtggtcaaaggggatgccaaggacacacatttcctctgagcactagaggctccaaccccacagacctaggcccaaccttaccctttcatttccccatcgcctttccccagactccaaatccagcaggaggaagtgtagacgtgggcctctgcaacatgtgaaaaagcagaaatcacaaacgcagtgtttttcagcaggtgatttaggcaactcttcatcagggaaagggctggaagtaaggccacaagcagtgatcaattgtttgctatttgaaggcaattcaaaaagaaaaaaaaatccccaagtgaacgttccttgggtgaccagtgtgccacctctgcataagtctatgaaatcaaaggccctgggacagcctctaatatggtagcttcattccaaggaagagtttaaagcacaaagaagagctgttctagttagtatgagtcagggctaaatgttaagtctcctgatgctcactggggcacaccatctctcagcattaggtgccaatacataacatgccaaatgggtttgatgtgagaaaggaagtgtctgccttataggaatcacttggcctgcatctaccccaggatttccaagcctccctttgccagcactggaaacgcattttgagaaattggagttggggccagaaagcattctattcccatcactggaatctgtgtggcttctatttgcaactccagtagatgtgaaactcttaaaatgattttttccagggtaggaaggaacacaatgatgtctttggctaaacagtgccgggctactgcacagttcaatcctgagctaagtgaagggggaaaagtccggggcactaatctggcgtgactggcagcacccgatggggtaaggaggacagatgagaagggtaggagaggactggtggggataggggaacagggaagggatggaaaggcctgcttctgaaggcttgcatctaacagaaaaggaagggaacctccctgacttaccatgcgggacccaggtaattttcatactggaagcacaatctacaaaatgcttccctccaacccatccccataggtacaattttaccaaataaaatcattcatactcacatccaaatttgccaatctgagcaaaatatagttagtaacaaaggaaggcaattttcatattttatcattcatcatagaaaaaaagctttaatattttttaattaaatacagaagaaaattgtgttgccagagagattgtttgcctgcctttgaacaaattaacaacacctgtttgcaaacaaaagaatttccagaatggagtcaaaccctttattctctgttcaggacccagcccattcatgtcttttgtatacagtatcaaacacatagtaggtgctgaataagtatctgctgactgaatggggtgcctcttttatccctatcctttatttcccaaccctaaactggatcttgatccatggggaaaatatccccacccatccattcctagagtagccctgtctctttcaacagtctttgatacataacattggtttagagacatatgcctgaagggaaaagagggagggtttcaggcagagaaagaaacacacaaagacagggcacagagactaggcagaaacaaaaagatctaagacagagagagagagtaactgaaacacaggtgcagagcgggaacaactgtgggagacagggacagaaaaaccaagtcagagaaacttaaaacgcacaccattggagataaagagataaaagggctgggccagaatgatcatcttgaagtttctactcagctttaatgttttctgatagagaaaatggcagagagagaggaagacacggcctaagcaggaggataaagagacaaaggaagttagtagaggcagaggcagccagccaggcgtgcctagccgggaagcctggtcctaccccggcctcacacccacggggatgggctcccatgcccactttcggctcctaccttaagtccagccaccctcttcccctacccgcccctaaagatctccaaaccactcggcaaatcaaatcctctctccccaacatcctccgtgaagcattctcgctgctccagcccgcactcagctcttcccctctcaactcctaaagccacacccacctcccctaaccacagggcagggctgttttcgagtttgcccttggctcctatgagcacatcttgactcctgcaaaagaactgtgtgcttgtcagggctccagaccctacctcctatattccagtattcttcatgacaccagcccaatgcccggtcttcctaagtgctcagtgaatactttagggcctgaccggccctaaagtgcacgcggggaccgtggccgtcccctggtcagtttggcaggctggccacgctgaggccatctcctgggctcctgcgccctctgccggccaggaggggacccgcacgcgggacagctcgcggccggaagggcgcgcctgctgctgggaggctggcgaggacgcgggcggccctggcaccgtccgagggttctgggaagggtggtgggcacagccaggaacagctgctgtgttcctcttaggcgtaggagaacaacccctctcgcccctacacctcctccggccctgcccgctgggcgctcagagcttctcgtccagctccaggccctggttatcccgggcgcccccgcgctcggggcctgggctgccgccgtgtgtcccactcaggtagttctggatggcggaggcgcagtctagccgctccatgacggtcatgaggtagtgcagctcctgcaggctgccgttctgctcctcaaacaactccaggatggccgctgcggggctgcgctggcaggacaggaacctggcccgaggtaggggaggaagagaagggtgtaggagcagggaggggctccccccctgctgcaggctccctgggctgcgcagcgcaaggtccgtcccttccccatcctgtagcttttgtccttgtcctgctcttgcctgccttccagggcacaggaggtgggaagccccagggctttgaaacttgagattgtcctggcttggaggccaactctgacccctactcctctctaggcttcagtttcctcttattaagatgagggcttagacaagaggacctctaagtttgctacagttctgatgttctgtaattgccttctctacctcccccactccaaatacacccctagcctccccctagcctcctaactccctccttcctccctctctcctaggccacaacatcctgctcactactaaggaaacagttgctgtaaaccatggctttttatcacgactctcccgtccactaaaaccttccagagtctctcacctcctaaccagcccacgctccatgagcctttctggctcatccagcacctggccttgccctgtctttatgctttctctcctttctcccatcctgaacccccttagctcaggcctctctctttctcgccttgcacacactacacccacagccacctctgctactccccaaaacaaaatggctgatctcttccccatcacttcctccctgaagccctttctagttcacccctcccaggtggaagagaacattctgcatccctcagttcagacttctggtcataacgcccgcagttcattattattcttgcttcagctgttttctgtctctcttcaatgtgttatacaatactggattcttacaggaaggcacaaggaacacttgcctttatttttcaagctctctgaaccctttactagtgtgtgcgctcctaggcgccgggaccatgcctcattcatcttgtatcatagtgcttagcacagtttccagggcataataggtacttgataaatgtttaaatgaatgatttaaaaatccaccctgtagtttgcagaccagcctggccaacctggtgaaaccccgtctgtactaaaaataaaaaattagctggacatggtggcgtgtgcctgtaatcccagctactcgggaggctgaggcaggagaattacttgaacccgggagatggaggttgcagtgagccaagattgcgccattgcactccagcctgggcgacagagcaagactccgtctcaaataatgataataataataaataaaaatccaccctgttttcagggtccagctctagccccatcaccaggataaagtcttccctgaccgctgcactcatagtgtagtttctggagcttagctcagtattctcctgctttctgagttccttgacagggatcatgactgcactgtcaccattattgataacatttattgaattaacaagtgtcaggcacccagctacatgctttacacacattatcctataatctgtcttgctcctcctcagggcatagcatggcaagcactcaacatgtaccaaataacttccatgttaatggattcactgttaaatgttaattgagcacctactatgcaccaggcatcattctaggtactgatgatacagtgattaatagagctgcccttttatgggaaatagggtggacagtagccattctctgacttttaagtcactcccttgcctgtgatccagtctccagagtgtcctgaggaaccccattccagcccaccctcctctaccatccacagacctcacccctcttcctaccggatcttcatgccgcaaagccccaggtgggaggccagtctgcgccagtcattgccggtgatgctgtttggctccaataacatccgcagctgctcaaagagctctgggggcagccttaggcagggaaaagggtgttcttggaagaaagggacaaacagacccactctggttctcccatatgcaccctaaatgctgtagtcaccctgtgggtgccagggtaggaacccaacatcccccaggcagcagcccaagcaacccccgtctcacctattgcatgggggcggctgggaaacaggtggtggcgctgcccaggattcctcctctgatgcctggaatctgaggatttccatatacttggtctccaagccctgagtcaacacagggcagggaacacacttaggggtcacaagccatccccctgagtaagaagctggagtcctacctccattcctcatgtctctccttcagtctgtcactcagagccaccttaccaggagatacaaccctgctccacccagcaccctctacccactgtctccctgtgacttcagaaccgcaccttcagccttatgtttgcccctgagctctttgggaactgggacatgaagaccagagtgcagcctgagccaccaggggaagtcctgggtggggccgtggagcagtgggaggtcatccaaccatagagacactgatctcagccatatgtgtaccttcctccattccaaccttcccttcctcttctccaagtgacaacagggtatctgcctgccctccactaaggtgccactatggttccccaaagactctcaactccgatttcttcgcatcttcccttggtgcagcaggagaggagagatacctaactcccagcctgcctactcaagaccctcttcctggtcacttcccacactgaaaatacaaaacatcatctctcaaatcccacactgaagataccaaacatcatctctcaaatgtagacaatcagcctagaaagaaaccatatcaacttgatgccccagttctctgagttgggagaaggggttaaactagggtttggttcttttagcttcctgctggattcatccaccgatagacaaggagagtcagggatgagggtaacttggagcccagatgatctcagcccctcaaagagctggtatgggggctctatggaaagtgccatctttacctatgtgattaagaccatagttactgggcaccagaccctgtgcccactttgcctaggatttcccccaggccctgcccttcctctgcccctcagctccaactcacatcctggaaggtgtgcatggtgacaatgatctcattggttagtgctgaacagtcctcattctcatcggctataaagagaaggtgacagcgtggccagtgagtgaggaaacggcctggggtaagagcaggagaaggtaagggactctatagtaagacttgggaaatctgaggaagctggggtccaacactccatttttctctctgcaaagatctgtgtggctcctggcctttcagggaaggtctgtgtgcatggctgcatgggggtctgcagagctccagggttactgggagggaaggagaggagacaggatgggaaaagagaggggaggaggtacacacagggctcccggactacctgcttttctccggaagcagaaggagcggaaggggcactttccatgccagatgtggagatggggaaccagctggcaactgctgtcatccacattctcccaacctggtgagtaggcagacagcagagggcctcagagagtggggccttaaacaagtattgaagggggctgtggggaggcatgaggacagaacaaaggcaggagggtctcaagggaatgggaatccccagagcctgggctgggaccccaagagggcccttgcactataaaagccttccatcctttcctgcttctgtggggtataacccctctccttcccacctgccacctggcatcaccctgtccaaggagtgagtggcaagggctcagtagacagcagagtggtcaaagccctgggggctccatgaggctactgctggcccagaggtcacaaacagacttggggcctggtgtggtggctcacacctataatcccaacactttcagaggccgagacgggtagattacttgaggtcaggggttcgagaccagcctggacaacatgatgaaaccccgtctctaccaaaaatacaaaaaaattagccaggcatggtggtgggcacctgtaattgcagctactcaggagactgaggcaggagaataacttgaacccaggaggcggaggttgctgtgagccaagatcaagccactgcactccggcctgggcaacagagcgaaactccatctcgggaaaaaaaaagagagagagacttgggatccccagatctccagatgtccaggggaggcccagaacccttcattcctgtggggctcccgatcatcctatcccacaggccactgcctccctcaccctctgagatgtacgtgagcttcaggcactggtcgcccctagccccattgaagtcgaagagctggcagggcccacgcaggcgcccaccatggggctgctcgttggtcagtgcccactgcagggcgcagggcgtgttgttgaggaagtagatacgcagttgcagatgggactgtcctggcaccagcggtgagcagaatacggccagctgcagccatttgcgggcttcgcgccccacaggtgcctccagcacacaggtgtagaggctgcagagggagccagtggcaggcactaatgtgcagggaaggctaagacaccaacacactgccaccagcctcctgccacctgaggggcctctgtggggccttcaaggaggttcagagaacactcgaggggagcacttagggaggaactggtaggttggggatgaaaagtgagcatgtcacagtgactggtgactgaatggggaggagagctggcaggggagagagggaaagtgggctcagggtgaccatgcttgggagggcacccgcacatggccctattcctgtcaatgggtggcaaggaggctgggaggcagaggacctaggactctagaaagacaaagagaagaaggacagagatggaatggagtcttagagaactggtgctaagcctggggacagtcctgaaaggggcacagtgtagagagagataatttgaaagacagagagagatgggaaagacaggtccctcttagatggagagatggtgctgagtcagacacttccagacagacagagagacagcaatgggatttgcagtcatggacatgattgatgtgagaaaaactgctacaaacattaggacagaggggccagaaagagacaccaggggataaaggatttgcagaccatcttctatacagagagatgaagataaggcagacagagaaagtgggcaggaaagacagtcctcagagagatgggtgtgggaagacaggccaatggcatgtgcctacctgaagtgggagaggtggatgcgacactcatcccgggaggcgtgggcccccggccgccccaggggcctccataccttggcatccagcagggtagtgttgctgctgtaggtgcgagcatggctgggctgctcggcacagtgtttgaacgtgagagtgcaaggcttcaggaaggaggccccatgggggccacatgccaccacagggcttaccagcccctgggcttgggacagcgatggggcgtccgacaggtcccacaccaggatcaaagacacccgctcctggcggcccacagccacagcacctggcagggagagggagagctgagatgggcctggtaggcaggcacacccctgcccctgaaagaggccaggccagagagaaaggaggtggggcaggagcccaggagagacccccagcagggcacacagggaagtggtatgaacaagagtaagacgactgtggagctgacttgtagtgtaaccctaagcaagacacttccctttccacccaggctgctgctagcccatagtgtgccttgtgtgaatttgcaaatggtgctcttccctccctttactagagaattgtcacagcatactgattcattagaacaaggcactttacttccacctgccaggaagttgtcccaaaagatatgtaatatgtccatccctgaagtcaataaagctatactcaaaatataaacaattatcagaagtaaaaggtgtctatgaacattgctccctcagatgtggtgacctaatgtacagtctgaccaactgtatgcggagatgagagccaggagctgttacctggtgggatgagcaaggagatgcctgtatcctggagcatcaggcaaccgccgcggtgatccacctctcgagccgaaaacaccaacagtttgtgcatcaactggcggaccatggtctggccttgagtgggtgtgtgtagctcctggtagaaggcaaccatctctggcagtgtggctggcaggtgctgccttgagacctcattttctagttggggggtaggctgggacactggttcctcttgaccattcagtgtccagcaggcccccagcagccttctagggcagtgccatcgaaggcattgggccagaaggaggacacttgccactgggacccccaccagcagtaggaactgggagggttggaatgaactctcctgggggcacattcgcctggttactcaatgccgctggctctccttcacccctgtgccagccaaagccaaaggcctggtggggaagaaggggtcagtgtcagggtaagcccttttaagttgtggaggtcaaggcttggcttacacatagctgcaagttgtcttcattccagcgcacactgcacactttagtcacaccaattcttttaacctgtctctcttactcgagaacctaccctggctccccgtgacctaatacatcaaggtaaactgttctgaagcagagtgagcttgggtttacagttagagaacatgagttcaaatgtcaccttggtcactgtggctgggtaaacttatcatattgatgtaaggcaggagagccccaaaattggggcttagtttgggagggtttgtggcttcacctaggcaagaattcaagggtgagccagtggtgtcagacagcaactttcactaaagtggcagagtatagcagcagcagaggtatgctccttacagagcagagctaaccctaggcagtgtgcccagggtagcagctctggggcatttctgccatcatatttatgtccacttttaattacatgcagtaaggggtgggttattcagaaatttctagaaaaaggagtggtagcttcgggtcactgccatggaaaggggcagtaacttccaggcatcgccatggcagtggtaaactgtcatggcactggtgggcatgtcttatggagaggtgcttttggtgccttttccctgtttcagccagttttctatctggcctggaatcaaatcccacctcctgcctcaatactgcttaatgtacctcagtttcctcatctgtccaaatatctaccttgatctacaagtgctgatacaaaaaaatctataagtggaaaaagcaagtcgcagagagataaaatattctgagctcattaatgtgaaaaacaaaactgcatataaatagatacatatttatgggtgcatatatggaaatgtaaaggtatagagaaaggtctggagcagtggtgtacaataaaaatgtaatgtgaactacacatgtaattttaaatttcctgatggccacattaaaaagaacaggagaaattaatacattttatttaacccaatatattcaaaatgttatttcaacaggtaatcgatataaaattatgagatatttttactttcttccttcatacccagtctttgaaatccatgtgtaatttatatgaacagaacagctcacttgggactggctgtatttcaagtgcccagtagccacgtgtactaatgaatccggtcttagactgtgcaggtctggaaggacacacccccaaactattcccatgagtcacaacaaattgagaaggtggaaggtgtgaataaaaactttgtatttttttaaatccttttctctgtactttgaatttttcacatcaagcatgtagtttgtattaactttgtaattcttttctgaagctattaaaagtggggaaaaagtgcctctttgtgtaatggtgaggatggcataaggtcatgtgaaaagtatttgtagatgagaaagcactgtccaaatgtatgtgtttctttatgcccctccttctgccagaaaggcctgaaggtagctcacagggataggcaacatacaacaagaacaacaaaagctaaaagtggaagcaaaaaaaaaaaaaaatgaagaagacaaaacacaaagatgcagccctacagtgaagctggaatgaggcagggcaaaagcatacactcacctcctgctcacctggctacccagccaggccacaggctgagacttcccagtagctcttcctgaggccctccagaacccacctccgcctcctcctacttcccctcttccagcccctacaatttccaacacgcctgccctgtagcctgcccaggctccccacacctgcttaattctagcctctggcttttgctcatgctgttttctgtttctccactcacttgctctccccacttgtttcctctccctacgtggatcctcccattcaatagtgcctcccgctggtgcaccggcctttgacagcctccagctcgcgaaatctctctccacagccatcccaccatactgagtcactcttgattatgtgctgtcatgtgtgattttcccactcaaatgaacattttctaagcaccggctgtgtatcggacactgtgggaagttcaatcctgccaaagatgacgtcttattccgctctcaaggagcttctgcaggaatggaattcattggcttggtagctgagttctgtgaggcacaacgtcctccttcagagccctgggaggcccctctggttgactcactagaggctgcactggaagagcttccagtatccagtcctccccacgcccttcacttgcactacccacctggaactgaggcttggcccaccttcttccttccaacctcaggacccatgaaaactgaagccccttcctagtgcctcttagaccagggcagaacctccactgtatcctcaggattgaagactggggcagtacctgtttctcccatgtcctcactgaaagtgtgaataagaagcgggggttggcattgttctctttgcctaaagagccaacccagcagacaatgcaccagcctttttcaaccaggcatcctggagggcacacaggtgaatcagtgaattggcagtgtcccaaagctgatgggaagggggttggagcagcaagctaccgttgatgtcccatcatttcttttggttctttcacattagtaataattataattccaactgtaataacaatagctaacattcgcagagctttactcaatgccactgtgttaaagcactctccatggcttgtctcatctcatcctcacagcagccttaggagcgaggtgttatttttatctccatttcacagataaggaatccgagctttctccccacagtgaagatggatagggaattactaaacaactgaagacaggcaggaaggaggagcaaagacgaacaaggacttccagagataccccctttctctctccaccccttcttttccccaagtatcttcctttccttctctagaagaaataaagttggaagagaaagaagcaaaaatgaagtaaagacaaatagaaggacctaaatttacatcctcagttatgtggtaatacccaccccactacaccacacccccacctaccaaggtaccagtggcaggggatggaattgctaaagggatgaaaggaggggccccagctcgcttacacagcagtaaccttcctggggccaccaaagaccagagtccagatccccagtgaggtgcacctcactgggtggtgcagtagagtcccctggctcaacctccgaccctggagaagttggcatgcaccactcccaaagccccactgggcctctcccagggtgactgctcttccaggctgccctggccctcactgcatcctccctctggctccagaatggggaaaggtccggagtcttgctgaatggcaactatagcactgcagccattcgagtgtgacttggggcatcccaaccccatgcctggactcctcattacccactcctccagtctgtcttgctccagaccccagatcaccctgggtagcgggtccccgaaacgagagtcctttagaatgctgccatcacctgtccctaggcagttgcatcctccagcacaaagatccaaactcctgctgcaaagttctgctcataccctttaagaaaactctcaacctttcctccacctcactggttctccctgtgcctccccaacacctgatagatgtccagttactgcagaacataacaagtactgggatggatggtccaaacccaagtcatgaatggcatttgttagtatagtagacatttccgcaggacacagaatcatcccagtggtcctcatacccattggccaagtcccattttcctcccctcctccagcagagggtccctacactccagcaggcaggctaagctggcctggctcctcccccgaagctccaggtaaccccatcacaatgcccatcccctctccagctgccccaagggggtgctcaacttaccgtctaggagctcttagaggctgctggctggtccagttccttctccgagaaacaagggtcagccagattcagtcggcaggccagcagacaagtggaggtgggcggggaatccaggcaggagtggcctggcatttcctggcagagccctgcctcccagctgtctaaagaggggtgagggagagtgtccctgtctattggcaaagtccagcccaggtaagggattagctgaggatcccagaagtcagtgaactttccagtctaggtctggaaggaaggagggaggcagggagacaacctgggtgtaggtgctgcaccttgaaacccctccttacagtgccctctgctggtgagtggctgtccccagccagaggctattattaaaatagcagataggaggaggagggaaccttcatctgagtttcttaaactataatgtgcacaacagtcacctgggagatcttgttaaaatgcaggctctgattctgtaggtctagtatggggcctgagattctgcagctcaaagaagctcccagctgatgccaatgcaaccggtccaaggagcttagagagcatctagttccacccgctccccacacagagaagacagtggagccactgagacggttaatgactcaccagttgctggtggacctgagatgtacccatatttttccttacacaaggtgctttctacttcccccacccaaagttggcagagacactgccggttgggagacaactgaactttggggccatttgccattctgagttcttaaaactctgcctaggagcggtggcaccacaagaatgaaaactccttgtggaacttttcccatgttttcggctgtctcctcagctcctggtacagcctgatagatagaaggtgttcaataaacatgtcttgaatgaatgagtgaagcagttgagagggaaaaggatgcattttggctccaactggccaacactgagcccaggtgagccacacgttgggtatgtaatattgggcaagctacttaactcctctgaacctcaattcccttgtctgtcaaatgcagttaagaatatctaccttgtgtgagataataattgtcattattgagctaataaatgtcaaatgcccaccacagaatgggtggtcaatagatggtaaccgttgtcaccagggtctggcctcctgcagttgaggaggcatggtgaacgcccccccaggcccctagttatcatctcccatagaaaataagtaacttcctctgcttttgtctcagttaataattctctagcctcttgtctctgactgcaatgccctcccctctgcttccttccctggtggaggtgagagggtggaataaacctcccaggggagcccagtaccccaaagtgcagagatggtagagagcgggcaacctgggaagcagacctcatgcctaaagacaagccaggaaggggtgctcagaactttgatagggaatgaaaggagtggggtaggggtgtttgtctttgttgaacaaagctctgtctgagtcacacaggaggctggactttgccaacagacagggacactctcccctacccctctttagggcggctgggaggcaggactttctgccaggaagcgccaggtcactcctccttgactccccacccacctccacttgtcagctgccttctcctctgagtcataaagtcctaggggtttgtgaaagatctgtcaagctagggttctaagccaggaaggtcatgccaaccaggaggctataaccaggggctgtgttcatggattatgaactcacttcccaagctagttcttgccactcttggggacaatcccaattataaggaggctctgaagaaatgtgaaggctcctaccactcactcccatggccacagagctggttcatgggatgcaaagaccacaggcatcaacagcattataactgggggctgagctgtcacaggagggccagtgtcaaaccctcaccacaagccctcaaacattccatcaaggggtagcctccagaggccaggcaccaaggagggtctggcagaccagaggggctcctcctgagaggaactctttggggccatgaaacagcaacttggacttcccagccagtgtcaccacccttctcatctgagaaaggcagatcagcagggagcaccactccaccctcctcccagccccaccctcctcccagccccaccctcctctgccttccacacatcatatgtcatcaggccccccgcctgggaggtgtgctgccagaggtaaggggagcacaggcctaggaaccaggaggcactgggagaggcaggtgtcaggagaaaagaggatgggggcagggaggggcagggagggggcctccaccactggacagaaatgtagaaaaacaggaaggcagaagatgagcaaacggacagtcaggagcacagaaagacaagtagaaatatgcacaggtgggcatgctgctcagctctgtcccagaacctccaggaccagtgtccctgacccttgacagaaaaggatggattagggccaggcacagtggctcatgcctgtaatcccagcactttgggaggccaaggcgggtggatcacctgaggtcaggagttcgagaccagcctgaccaacatggcaaaaccccatctctactaaaaatacaaaattagccgggcatggtggcgcacgcctgtaatcccagctactagggaggctgagacaggagaatcacttgaactagggaggcagaggttgcagtgagccgagattgcaccactgcactccagcctggacaacaagagtgaaactctgtatgaaaagaaaaaaaaaaaaaggatggattagatagtcagtccagaatactgaaaataatcagattgttttctctccttcaaatctggttaatcatggggggaggctgaaatatcatgaacaaatgagaagaatgatatttgtggggccttggtggggccttggctggaggagggtctgtacattgtcccacatgcaaatgacatgcaaagcaacatgccaccttggcagctttttaatcaaagaccaggcagttgtttccttgaaaagtcaggccacaagaaacctggatgcttgtgcttacatcctgacactctgggaatggaaagatggagcaggaagctcataccccatggctccaggggtagaagagagctaaaagttcagaaaaaggaatccacggtgtcaacaggccaagtttgaatttgggcaggagatcagcctgggtgggccccatgagtgtgccagtctgatatggtgagataagcctgggacagatgtgctgccgcattcgtgactagaaaagagtccccaggaatttctggctcctgccttcagattgtgaactttccaggttggtagatcagcttaggtagaacagttctcggtgagggccagctacatacctggctaagcgctgcccactgcagaaaagctcatcacccgggacctgatctccaggactcagaagcacttggaggaaggcctattcacttagaagcagttaccagtgctgggcagtgtcctccaagtgccagaggagtgctgtggagaaaagaagtccatggaagccaggagatgggcaaggtgtggcctggggttggagagagctcagaggtacaggactggagctgggccagggagagaggaaggacctccgtgagtagaccttctctgaggggctcaggccaggaaatgagtcaggttaggaggcagagacagacgaggagccgcaggggaaggctcatcactagcatgttctctgcctccccagattttgcctcttcaaggtgaatgcggcttcaaggggctatctttgtgctcctgccccacctggggcccatcctggtctggctgttcactcgtgatcacatgtctggttggtgtgagggcccgaggatgctgtcctggtgcccattctacaaagtcttattgcttgtacagacagccatctactctgtcgtggggtgagtacttgtttctcacacatggccctggtacccaatggggtgggaacaagtcctctatatctgaattactcccatatattggcctccaaaggtaggcgctttgtcttgcctctcaccaccatagtgggtcctccagaaagtaagaaaccctctatgcctgcctggggttccagttagcccttcttccaccctctctaagtctccccagcccctcctccacctcaccatgcccagctcctcccaccaactccctccctggcccttacatgatgcctaaacccatctgcccccatttcagcccacaagggtatccaagagtccttatgccagagagcctcctccatttgccacggaacctcctcccactgaatgtttttgccaccatgtctccacagctatgcctcctacctggtgtggaaggacctgggagggggcttggggtggcccctggccctgcctcttggcctctatgctgttcagctcaccatcagctggactgtcctggttctctttttcacagtccacaaccctggtctggtaaggcacacagtgctcagtagcagaagtaatgtgggagagggtgaaaccacctggctccagaagcacataattcagcagagcaattgagtgcaggcaggtaatgggtgggcagacttctctgcactcccatggtgtgcacagagccccagggactgagctcgttgctgggctgggtactgcagaaaggtggaggtgctggttctcgggcagccagctgacccccggcctctatgcccaggccctgctgcacctgctgctgctgtatgggctggtggtgagcacagcactgatctggcatcccatcaacaaactggctgccctgttactgctgccctacctagcctggctcaccgtgacttcagccctcacctaccacctgtggagggacagcctttgtccagtgcaccagcctcagcccacggagaagagtgactgaggccctagggcatgggagaggagggacgcccagggtggggaggaagagtctgcaagcagggctgtggagttagggttcaccccaatgggaccaccctcctgggtcccctggtgccgtttttccttagaaatcagagaaatgggaaagggggggaaactgattttacacttaaataataaaatcctattagtaactctgaaggtatgatgtgaagtgtgtatttgaatgcataatatgatgactagggcggcagagtgggatagaagcttctggacctctgtgtgagtgtgtgcgcgtgaatgaatgtgtgaaggcccatgggggaggggtgggcacaccagctcgcctccattcacatgcctccccacctggcataaagatttagcactcagatgtttaattacctgaaaaacaaaaggctttttaaaagtgacaaaaaagccaaaacagaaaaatacaccttaaaaaagggtactagggggccaggagtggtggctcacacctgtaatcccagcactttgggaggccaaggcgggtggatcatgaggtcaggagttcgagaccagcctggccaacatggtgaaaccctgcctccaaaaatacaaacattagctgggtgcagtggtgagtacctgtagtcctagctactcaggaagctgaggcaggagaatcacttgaacccggggaagaggaggttgcagtgagccgagatcatgccactgcactccagcctgggtgacagagtgagactccatctcaaaaaaaaagggggggatactaattatacatgttaaggttatatagtatatattatacattaatttatatatcagatttatgatgcaatatctagttataacatatactatggttgtatgatatatatgttatacatctctgataaataagattatagaccttcttttttgctttcatacattcctatgctttccttattttacatcaattaattactattagaataaggcaaagaagattgaaaaaaagagattaagcctcagggtgctgacaggtgaatccataggagcttcttgttcagccttctatcttgcttctctttttctaaaccttcttagtggctttttaatttttgactcctcccttctctgattttcttctgtccttgtttcaaagccctgatggtggcaaggagtgaccgcccttgagtaagcctcctcaaatctttaacaaggtcagctggaaggcccagacaccttgcagtagggggtctccacctgctgcatgatggggatcaccagaattgtttaaaaatcctcatcagcctctccaggaaggaggcctgggcatcaacatttttaaaacttcccaagacctcctcaggtgcagccaaggctgtaccacagctgtttggagctatttaaaaaaatgcatgttcctcagaccgcactcaggacccataaatgagaacgttgcgggtgggctcttggcatcttcagatttaaaacctcctgagcacttctgtcagctgctagctagtttgagtgctttgggcacagatcgtttatcagggcccgtttagccttgacactctgaggttttgtgagctgagttttagagctgaaacaaactgtatgctctcaggtgagaagccagtaaggcagcataatttgagaagaggagtggctctttccagagctcacccaagagagggagtctgcagcctcccctcctccaccaagggcatgctcagcccagtgggtcaggtcacaggcaccccaggaggacacacacagtgtcccacccacctttgtatctccagccccaggacagggcagagcacagagtaggtgcttgtacgtttttatttgttgattaattgaacgaataaatgaacacattgttgtactttaaaaacaaatgctgaccagcacctgccgccacccctacccccacccctactctggaacaactgaaaaaagaagggaaaggctttaatcattttggaaactcctggttctaatgtgcagccaaactgagatgtgctgctgcagggtattgcttcttactgcttctcaaagtgtgccccagagacctcctgagacacttgttgggactccagacccatgaaatcaggtcatcttggggagtgagagcaatagggtatggtgatttgcagttctggccatggagtcagaccaacctggggttggatattgactctgttatctattaactggtaacctggtgcaacttctagctataaatactgatggacagaggataggctcggaacccaaaatacatgggttcttacccagctctaccaccattgtgtgatcttggcaagtgggcaccccagacattatcttccattatcattattatcatctcataataatatatgcattgtaatatttgctaccaattttattcattaccagctaattctagaagttaggtggaacctccaagaagatgtatgatgcctagggtattactttgacctccccaaggcaagctggagccactaacccatgcctctagcttaggacttagccctagaagaaagcttaatttgggcagtgtcccaagccctgggctagcacgaccgcctgatacagcatgagccaagctaaagagatttttggccatgtgcagaaactcagcatgaaagggcagaatcccaactccaaactcttatcctctaactccaaagttgtccttaaaatcctcctctgccccagctccttggttcctgggtgaagggagcccctaatcccacagtctccaacctccctggggctcttatctttccccttaccccacttcccagttcagagcccagcctagtggacacctgcctttgcccctcctctcttgttacttaagagctgtgcctaaatagacttggagctgcctcttctctttgcaagtgtatcccaagcttccaccattcaaattatgtgcacatttttgttctgaggcagtatttttccatttgcctctgatttggttgagtcggagacagacaagatcataaggctctgcagatctcccgtccagcggctagagaggcactaggtaaaacagcagacccaggaggtggcatatctcattctattgtatcctagttcatcctttcctcttctaaaccttcactcttcctcactttgccaatttctgcagaatggaaacatagagaggctaggtgagatggcagagtggtaggtgtatgtctagtggtcaaagattggtcagctgggctaggaacagggcagagtgtaggatgtatttattctgcacatctctggcccctcctacctacaggcaggtagagctgctgcgcaggagatgcctagaggcccctgaatgttgtcagtcctgggccagggctccaaagtctcttttcttttgtgaatggccactatctgctctgtcgcttggggctcccctgtaccccaagcccagtttcagagtcttcccagaggtcccctttcttgtagttccagaaaacaagcacacaatccttttgttttaaggattttactgctgattctcattagcagcttacaaggtactcagtccaaagcccaactttgctgagaactccctcagatctcgaccttcctcttgtatcctcaagtagagcccaaaaaaacatttacttgcctcccagactccttctccccccacccccaaatgttgaggacactccatacatttaggctcttcttctggtatggaagccaggggaagccatccctggtcacaccagggccttgatcatgttcatcagggcctcatttgtccctttcccaggtcgcccagcccacacagagattatccgctaagacaagtaccagaaaaatccccctagcgtccacttgcacctactctaacacatttctcattttaagggctgaaattcccctctcaagttgattgtagtttgtcacctcttcccagtaggttctttggccttgcaaacaccccttcaaagaggaatactattagtcaccttaatgtacatgatccttatcagatcactttctttaaagactgaaagtgccagccacgggagctgggcagtgccaggagtagccactggaatggaaaccatggtgaccaggactaaagtcaccattttacccagggtggtgtgtcccacatggcaaagcaagcattgtgtcctgtacagaagactgtaaactctgtcctgccctgtgattctggtgccttctccaatcccagcctcagactctgggagacccttggccccctcccctcttcattggccaaggctgctcaaagccctggacacctcacgtttatatcaacagagcagttgctagaggaagcagcctcccgccctccagaggggtgtctggtgcccgagccctgttgtttgtgtaccttgtctcagtagtgaccagaggggcaggcaggcctgggctgtgtctctggggcaacgtactgttggggtcccagctgtccctgcacataaagcaccgactccatcaatgcacccctgaggtatcctctttcagggagtgagaatttaaaccttcctctggtgaggcttctattttccaccagccctgctcctggcctctctgctcccttcccaatgagggcagctccacatccagccaagatccaaggaacaaccatgcctgaccctgtcctctccttctcagccacctcctagaatctctgaatgttttctgaaatgaccgtgggaaacaggacagggagaggcatgctgcagcgtatcccaggcctaacccagctcctttcagccactgccatcccaacagaagggggcaagggcctgcagagacaggctgggaggattccaattttggtttccatccccagatactagctgtctggtgtctctttacctgtacccccaaaacacagatacacacacacacacacccctcatgtaccaattactccctagagtctgtttttcctgcaagaactccttctcagcttcttcaactcccactggtctctgtccttcccttctcccagagctgggcctcatgggtgctggcagcagttgagactgaatggtgaaggaggtaaaacatgactctggaagcacatggctctgccctctctagctgcatcaccttgggcaagtcacttaacctctctggtctcaatttcctcaccagaaaaattaggataataatagtacctaccccaaacatccttgtgaggaataaatgagttaacctacataatattttagagtaatgtcaggccagcagcaaggactgtgttaatgtcagctctccttgttactaaattccagggaatatgacacagtaggagaagcatggaacttgggagctgacagatatgggttcaaatcccagcaccccactgactccacatgtgaccttgaatgaaataccttactgcccagtatcctcctgtgcaggagggggactactgatagaaccttacccaatagggttaacactgggtgtggggtgtgccagccctgaagagtatagaggcagctgtagggagaggagtcaagctcctggaatctgatcccccagattagttgctgcactctggggtgagcagagtaaactggtctgacttggaaagaagagccagagaccagccaggaattcaggcccccaggaggtgccataaatagctagagcagatcagagggcctccagggatggcaggctgggagacggggaaggctcaaaggagcagtgaaaaaggaagctgtcagtcatcagtctgggggcagacccaggaccctctcccaaaggtcgaagggaaaactgtctataagtaagacagaagaaaggggtcaactcttaaggaccagcctgagaccacctgggcaccattcactctgagctgttgggagaggcaggaaattctcgacacgccattcacctgtggtcttcacaagcccactcggcgccctattttctgccctttgaccatttggaaatagaaatcaatagcacagcctgtgtcacagatgggaaaacggaggctcagagatgtcaagtgatttgtccaagatcacacagtgaatcgggctaagatggggatatgaacgtagaatattttttgcctcctaatccagggttatacatgacagccaaaatagaaggccctgtcctcagggaggaagtctttcttgcaggggaacagtgaactgaaaggatccatcctccttgctttcctccccaagacattttactcttcctccgttgatccaagcatatcaccctagctgggcctgggaagtgtgagagggatgcacatttataatgcttcagagatgtttcatcaaaggtagctgtgcgcagccctgggaataggctaaacttgaacttgggctctgaagacctgaactcaaagcccgtgtgatcttatacaaatcacttcacctttctcagccacaagtccctaacttgcaaaatgaggcccataattcacacccatgtgagactggtgtaaggactaaatgagataatgcatgcttgaatgcttgattaatgccccaaatatgataaaagctgggatcccctggtgagccagcaccttatttatctctgtactcttggtatttaccaccgcacctggaacataggaacctctgataaatgttgactgaacaagaaaatgaagtaaactctttacatttaaacgtggtatgtttgtgtgataacaacattctttgcagtttatcagctgccactgtctttttattgtggacacaggcactattatctctactcagtgctttattccccccgaaaaatgtttgaaaaaataagatccagataaaaatgctttcagtggctgggcgcggtggctcatgccacccagcattttgggaggccaaggcaggcggatcacgaggtcaggagatggagaccatcctggccacatggtgaaaccctgtctctactaaaattacaaaaattagctgggcctggtggcacatgccagtagtcccagctactttggaggctgaggcaggagaatcggttgaactcgggaggcggaggttgcagtgagccaagatcgtgccactgcactccagtctggtgacagagtgagactccatctcaaaaaataaataataataatccttttagtagtaaatccaaaaggtaggggaccatataatttattgtccacagcgggacacctttgggagtaaaggggtgctattagtaattatgtctggacaacaggaagaaaccatgactggcaaaccaaaatgctgggcatcacactaacagagcactctgctgctcagactctctggaggagtgagccctaaatcttccaaaccatcttgactcctcttctttagtcagaccctccaaagggtgccctaccctctcatccccaccagccaaacccatttggagctgttttcagatccgttccccagtgttcttaggttcctcattttcaacctacaagtgaccctgaccccttccttctgcttccctgagaatggcctagagtgtttgcactgctccaaacacgaagacttttgcctctgctaagtacccatcatgagagctgcaaaaatcatctagccatcctctgctgctgttccggctcagggtcttttctatgggcccccatcatctctctctggcctcagtaggcttctcactggtcccctgcctctgctcttcccaagtgctcagaccacctgtctcacctgttcagagacaatggcttcccacctcagtctgagaaaaagcaaggtacttatgacagcccataaggccccagtcccttttacccttgttatctctctggcttaatctcttagaactcttcagtcacccagatgtatgtcctcgctagttcctcaaacaccccaggaatgctcccttctcagagcctttgctcacgttgttcccttccttggaacgctttcctcttagacaaccaaatgattagttcccttgccttcttcacgtcttcttcaattgtctccttttcaaagtccttcaccctggccatcctataagtacgtaaccccacctcttagcacttcctgtttccatttcctgtcttttctccttggcacttgtcatcacaaaatagaccatgtattttacttaccttatttgttgttcagttcctcaagctccacaaatcatcacagcagggattttcatttgctttgttcttttgccatattcccagtacctgaaacagcacctggcatagagtagatactcaataaatatttgttaagaagaataaaagactgactgtgagggcacatagcatggaggttgaatatttggcctgaagtacaaaagcctgcattttaatcccggctctgcacacttctgtgactcagtttacctgtaacttgggataatacacatcgcctcccatggctgtggcaagcatgcatctgatttcatttaaacccctaaacccactgcctggcctgtttcaaaatctctgagctaagtaaatggcagctattgttactcagggaggctcctgatcgatttgacattacattatggctttgtaacaggcaaatcagcacccaccgcttttgagtcataactcacacacttactccccaaattgtcagttttgatcccacctctgccaggacccctcctttcctgaacccacgttcccccaaagcaaatggcctgggtctttttgcagtcagcccctttcaacacacatctcctcctgtttaaatctcagaaggccaccctcctaaatctcaggatgcctgccctggggccccttccacactctcccccagtggagctagggaatttgggtgggaaacaaaggggagaacataaggtgagctgagagggagagggagaagagagcaggccaagccatacccacctgccaggttcctgtctttgcctactgataaataggggatactaatggccagattttccattcccccaccccagcacccgctgtcactcaattaaaaaaagatagagggagagagcctgggggaggggcaggaggccttggctataaagcctgtggctaagtggggaaagcacgaagcctggcctgctgggtccttttcccgtcatccccagccagatttagctgctgacagctgcttgggactctgccgccagggcctggcccagacctgcctgcctctctcctctccctcagtgactcctgagccacagcccctccatggcccagaaggaagaggctgctgtggccactgaggctgcctcccagaatggggaggatctggagaacctggacgaccctgagaagctgaaagagctgattgagctgccgccctttgagattgtcacagggtaagcctcagatgtgggtcagggttctgctccctagaagagtgcagccttgggttaggctgtggaaattcaggatggttatattaggcgtcagggacagctacaaccctgcagcagtgagagtgcaccagtgggcccggcaggggtggtaggggacccagcagcaaattctcttggcttctcagggtgacaccttgggctctctaatcagggagaggtaggaggagctccttggaggcaaaagcccagagaataaaaccacccttcaggcctcctggtattgggatggccacctgcctctctgggtagaagcttagtcccagggagtttggcgaggacagaggatgagactggcacatctatatgtggctccgttcaaagcaacccttcccctcaacttctctgttcctgagtgggtctctccgctagccataggcctctagccctttctttagagcttcttcctggagtagatgctcccaagacaggaaagatagatccatcctttcccaagactcagaagcagcttttttcttattaaatcttttgagtctcctcaggggctgtcccacagagaaacagagaaattacatgcagataacgcagcccaggagcttatggacacaggagctgttccaacatgctcaggcattgcctggaggaactgggacccaaagaaaagggtctacagactgcaaggagggggctgtgtgcagggtacctctgtcttatccagattatgccatctccaggaataaaactaagtagtcttcttcctcttccctttctattcctgtagtggaagacccttctaaatcctgagcaaagaataaaaagagaatctatgaggccatatttcctccttgaaccaaacgttcccttcatggggtctccaggaatgaccacaggcagagtgggtgcgagactaagagaagtttcaggaagaaaggaggcatgatgctttcaagggggaaaggaagccctgagtggcaatttggacttgatatttcaagcttgacaagtgattttccagtcagccacagttttagcacttataacatgaagatctatagtagtaaggtcccttccagctcagatgttttctgattttcaagagaacctaagggaaaatgcatcctatttcctgaggcaagagtagcccctgaatttccatttgcccatgcccacccaactaatctcaccctcatcctaggattaagggagcagctgggcacagattaatatagacacagggaaagcctaaggcagcctggccaggagagtcctcaattccagtggctttcttatggaaggagagcctttttctaacacctaagcatgctggtatacgctatccttagtcatacacacacgcgtgtgcacactacactcttgtgtggctttccaacacagagggagggtaggtcaagaacagaattagactatgtttgttcagctgaacatgctttgggggtcccagagcaatggatcctgaagggttaagtccactgatataacttacatttgtccagggctttataatcacaacatagtttcatgaacatgagaccattcaacactcagcacaaaggtaggagagggagatatattattgccactttacagagggggaaactgagactcagagagattgaatggtatgtccaaaaccacagaactggtaggtggcacatcttcttactcccagcaaagtatcctttctactggtttcttattcattctggatcccaggtttcccagagctccacgttatctctatctgggaggtagtgaggacccaaggctcagaaaaaggggcacagaaggggcaacgttctgagcattctgtgaacagttcaggtgggagcagagcgctgagtgtttcctggccacaagtaacagctgtagagagctgtctcctgggcccctctgggtaaacagatggcttaaaatagcccagaggtgcagctgggtctgtgcagggagagggtgagggaatagctttcctctccttccctcttgagatgcattccccccaggactccctcctggagtcaagggggtcagcaaagcagcttttctagcctggtctcctatagggaagatctttagtgctccttatatttgggccaaaaactagcagaagagcaggtagcttttccggaaacagtccgacatgaggagggtagctggtaggaaggagagatgcccagctcatagcgattctggttgaatagggcattcaggatagaaagcggaactgagcacattaacaaaataacatggtagaatgttctggaaaagggcctaagcctgccgtagcgtgctgaagccagttcctgttggttcacaagtctcttccctactctgcatccagtgatatcacctcgggagcttgaaatctctgtaatgggagtacttaccttatggaaatcagcaaactttagaaattggggattcttccttctatcagagagatgagtgttacacttatcagcacaccattgaaaaccagaaacctctgaaagtgagaggaagagcagtgggaaagggatcaggtttggtaatgcttaagacggagctctgaaggatacaatttgaggcctggagaaggcatcatatgtatcatacatcaatttcctttttcttttttggagatggggtcttgcttcttgctctgttgcccaggatggagtgcagtggtgcaatcacagctcactgtcgtcgcaacctcccgggctcaggtgatcttcctgcctcagcctcccaagtagctaagactacaggtgcatgccaccacgcccagctaatctttgtatttttatagagatgggttctgactgtgttgcccaggctgctctcaaactcctggcttcaagcaatcctcatgcctcagcctcccaaagtgctgggactattggcgtgggccactgtgcccagactagctttgagtgtctactgttgtccaaaaccttagaagttagattactcactctttcaggtgaggaaactaagcctcagagggattaagtcatatggccaaagcttgttgatggagtaggatgtgaaccccaggactgtctgactccaaatcatcacactgcatccaaaaaaccagagaggattctttttatatttactgaataagagtttttcatttactgcctgtttcccctgttagtatttaacctctatgaggacagcactttgtctttttcactgctttatctttagcacctagctcctgataggtactcaatacgtatttgttgaataaatgaatgacctaatgaataagaaccttttgggtggttcttaggctctctgtcagacaagacagggaatgaactgggggagggtttcttgaggacagcagctcagggtgtatgacgatccagcaacactagatttaggtaagaattcccctggctcatgcctgcttctggacacagcacgttttagtagagctctggggcacgagagctggttgtctccccagctttccaacccagtgagaagtgactgtggctctgcctggcagcacccttgatgtgagcttggctttgtctctagttatgttgtatatgtttttacagaaagcagaacctcctatcccagggattattatggaacaaagataaatggcacacagagtgattcttcttctaaccacttctttagctaccagtagtttactctagccatgtaaggaacacagagaggcagtgtccagaggagaagggtgagataaggagtgaggggacttcgacaccagttaacaccagccacagccctttaccctcaccctggcctctggagcacgctgggtggtgtgtcaccaagaagagaaggcagcgcactgactctggccaacctgccttccacagagggttgggggcaggtcaaagctcaggtgtgaagaccatgcctaccagggaaaacaggcaagttcagggtttcccttgggcaaaatcccatccagtcccacagtctggagttcccttctcagctctagggagtcaggctgctagaaccctctgctcctgctcttactactctttctgattatgcccactccttggtatccgctttgaaaagtggtctgagaaagcagaaggccaatgaaaccagcaatcctccctctttcacgccagtcaccaacaggtctagtgagggaaagctgaaacaagtcaacacataattacctatgagtagatttttccactcatggattattctggagcaaatgtttaatctcagtccagcttcaactgccctctgggttgcttcctttcacagtatagatttacgcttagaaaattcaaacgttttgaatgtgaacctgagaaaaatgtattacatttactcacatcccttctccctccatcaagcagattatcttcccaattttttttctagatatttggactctctgtttcctcccaagtgaactgaaatgtccagtagcctgggtctaagcagatgaagtgtgactggtcttgtttggagaaagtatgaggaaatggtgcttaacaaggtgctatcagaggctggggagagggaatagaaatcaggctgtaggtttctacgcatgaggaagtgactggatcagggaaagaaatctactaccagcatctctctcctgaccaccacccaccaccaccaccccaccccacacacacacacacacacacacacacacacacacacgtttctacgcatgaggaagtgactggatcagggaaagaaatctactaccagcatctctctactgaccaccacccaccaccaccaccccaccacacacccacacacacacacacacacacaggtttctacgcatgaggaagtgactggatcagggaaagaaatctactaccagcatctctctactgaccaccacccaccaacaccaccccaccacacacacacacacacacacacacactcacacacacacacacccccacccctttaccagtaaaatattttctgggttaaatgtaaagggctatagttaaatatgatacttaggcctatcatgctacttaaaaaaaactgctggtgatgatttaacaagttaggtgtcattatttccttccttccactagtgggcataatagtgttaatttattctgtgagtctacaaaattgcccaagatggccatgttgtctagttccctggagaaattccagacttctactacctctgttctcctggtttccccccaggacgtagctatttcggtctgtgagaggcctaaagaatctcatctgacctttttgctccttctagaagaccaagaaacccattcagaaatcaagcaagtttagtctctgagcaagcccaagggaacgactaggaaccaaaccttccctgcctttcctttgctccttgaaagcacttcttttcctgaggcatctagtccagaaggccctgctgagggacagagtagattctagggctgctggccagaggggttggaaacccgtatttatagagagatgacctttcttcctctcccttgggtttcaggtttctttgggtcttctcctcttgcctagggaagaggaggaggggaaaatgtcagagcttaagaagggcagaaagaaacagtcacctcacaaccatcaaagccaatttgcaattgcatgctgggccaaattcacactggcctaaattcatactttcagctgagctatagggagctccagaaggaaaagagggaccacacagcagctactgtttaagcttccaagctatttgagtagccatgaatacttgccagggttccacctgataatccatcatataggtggccctggattagacttggggagtggggcaaaaggtcttgaagagcaagtttgggcaggaacggtaagctctgagcttctcaaaagcaaaaagccactccaggaagtgaagggaccatttggcaactggtaaagttgaggagtggtctggtggggtgagtacctttggggagcactcactataagtgaacgcctgacagggattgagaagaggagcagggaaacatcaggcgatccattctcctaaaatgttaagtaaacaataaacacctccaactagggacacaggggcttagagagctaagtatagtacctgatggaatcctggggctgggtcctcaaacacatccatctccacagtggaaaatgaacctgacagcacgggacatggaaacttgggtggatacattttggtgatgggtgggggtgagggaatcctgcagggaaataagtcaagtttactcatatctttggcatctgctgctcatccctaggcagccaaggccctgggataccagggattcccctgcagcccagggagtctgttgacttctttggggaaagagaagaggtggagacaggcaatagtagaattaatggtgccataggtatctcttggggcaggcagagagattacatttttaaaaaggaaaacattgaatctttctagctggtactcatctcctcctctcttgacatttttcatctctcctattaaaaattcattttctttggacttcaaacttgaacaaatcttgcctattttagaaaaacacacacatacacataaaagtaaaaacaatcttcaactctgatgtcttctctggcccttctcttttttcttctccttgttattaccaaaattttcaaaattcctggacttttcctgctgttttcatttcctaaccatccatctcctcctcaaaggcacccacacaattcatcaccaagtttagtgtcctaagatacctactggacttgttcaatttgaggcttttcctcagcttcacactatctgcctattgccaagactgtaatcttgcatggacatcatttttattgttttccttctcaagaacctgtaacaattctctactgcctcccgaatcaaggccaaactttcgagaaccttcataatacttcctttactgtacctatccaattttagcagtcttataatgttctcagctgttttatttacatcttctctgtccagctgcaatctagctgctaaattataagcatctggagggcagagaccaagtcctttaagatttggaggtgactcaatactaaatacaggcttaactatcccaagatacccttgagtagtctgtcctcacagataaaaattcttggacacttagcatgtgacaatccctttacctgaaagtaaacagacttgagaagtagtcacttgagaaggagagcatgttattgcaagttttaggccatttcatgccaagatgcaatttacatgagttacaaggaagagaaaaaagcataaaatgctctgcaaaatctttgttttgctctgtcatgagaaattttatatgcttgctacttacctggccacttattggaatcatccagagagctttttaaaaatactgatgcttggaccacctctccacatgttctgatttaattggtttggcatgaggcccaggcactgacattctcagtcttctaggtgattctaaggtataggcaggttaaagattcagtgatttagaaatgtaggggtatgttgtgctggaagagtgatggtggagacaatgtcctagtagggtgaccaaaatgcacacctcagtccaaattctcctctccttcagataaacccttctggattttttaatgcttttttttttttttttttttttgtcactgatgttaccacagacaagacctatttatagtaagagtgaatgcatttctgaagtactgacctggaagagctacctactctaggctggttctagaaacaagaacttatcattctttcctgtccttttgtctccttgacctacagagaacggctgcctgccaacttctttaaattccagttccggaatgtggagtacagttccgggaggaacaagaccttcctctgctatgtggttgaagcacagggcaaggggggccaagtgcaggcatctcggggatacctagaggatgagcatgcggctgcccatgcagaggaagctttcttcaacaccatcctgccagccttcgacccagccctgcggtacaatgtcacctggtatgtgtcctccagcccctgtgcagcgtgtgctgaccgcattatcaaaacccttagcaagaccaagaacctgcgtctgctcattctggtgggtcgactcttcatgtgggaggagccggagatccaggctgctctgaagaagctgaaggaggctggctgtaaactgcgcatcatgaagccccaggacttcgaatatgtctggcagaattttgtggagcaagaagagggtgaatccaaggcctttcagccctgggaggacattcaggagaacttcctatactacgaggagaagttggcagacatcctgaagtagggcaactgggctttgcctcacgtgagttttcctggtgccatggcaccaacactttattatgttaactccagtagaaggtgtgaggtcaggtagaatctgtgatatgtctgattttcctttggaagggtttcatttctctgcttttgactggttgcaaaaatagtttagaacatgtctctttcctctgaatccctctctaaacttttccctcccacacttttgtatcaaagtaactttcccctaacttagaatactcaaggttgacaggaatcctaaaactttcatgaggcaagatgacgttctttggtaagatttagatggtgcaagcacctgctactgaaccacagcagagaagatactgaaatcctctgagtatgcccctgtgtacatgtcagggattactaattccagacatcttctagatgcctcactcccatatccactggcaatcttaccattccatttttctctaatgaatgttttttagtccttcagggacaattttttcacttatggtaattttgaaattccccaaatggactggtatttaacttgttttaagccagacctgctttcatgttttcaaacaaatggctacactttgaaggagaccaacaattgctgtgtgaaaatacaatacgggaacattttccttatgttgagaagacctcagtagaattcatggaggatgtcgaatgcaggaatggggataatatagcaacaagctagtccatgcaggaacatttaaagagttaaaaagacatttgtaaagtaggcagcagctcagaagtaacctcttacagatatcaagaggtgataggagaaagattagctatttaagcaaataattaggacacaattaaggccaatttggcctcttgctgagggtaaattaaactctaacagaaacaggctaattaccctcaggaaagagggctaaaggatcctttactatcttttttacatttagtctgattgagtttgcgcctacagaaatgctatgacgaagccccctttgcaaggccccagttactgatcaaaatcttccagtaatagaggaggggtactcacgacactcttacccaactttaatcctgcaacaactcacatattactaaaacatgaaaacaacaagcttccatgaagataatttacttttggtctctctcactcctaacacccttaagagaagatgtcgcttcatagacacgtttaggaaatatcaatgttccagagcttgatgttggcaggtgttttctattagacatgcacatgggcacctgatcattctcaagctgagcatttgccaacccatgaagatacaactttcagccatttcttttaaaaagcaggacccagtcactgaagtcagtgagcctatgatagggtatactgtgtggtactctgctcacataaaataagacactttatagtggtgaacagtagtcaaaacagatttctgagggtgccctctgagaatataaaatttaacttttagaattccttgaagattttgttagtgtatgtactatcactgtaattataaacccaacatagattctacagactaaccggcagcttaaaatttaaccccagtatattttcctttcagacatctttcagagtcaagggcccaggtgcctaactagcaagtccttagagcttttttttttttttttttttttcagtgatttcaaatataactgtattatctggacccattaacatgcttccctgtcttctatttgaattgctcatgtttgtgaagggaaaggttaagatatatcaagttaaaaaaaaaaaaactggcatgagataagagtgtaatctaaaagcccaaaagaacaaccctgcttaattaaaataatcttgagaaatgagcatttgttaaataaagtgtcttattttacatacttatttcatctttcttttttttttttttaatgacaaaatagtatttaatcctatatttagtcaaaagaccagagttaaaccagatctcttctggggctttttctgtgtaaaccacatcaaaacatgaacgaaagactggcttctggtttagtcaatcctggtaaatttacccaatcctgcaaaggaaactatggaggagaaatccagggacttgttgggaagggcacacagaaaccttagttcaaaaagaaactagtcattgttcggggccagcagagctctcagtaacacattttctttgtttgttttaccaaggtattcctgctgccaccaagagacagcaatgacatgtacagccatctgggacatgcctgtcttcctaataccatttggagctggacaacatttgacaccaaccaatcatactggacaaggcccttagaggacttgaaatatacttctcatgctgtagtttatttaggctgtgactctctctctaatgctgctctcgggaaggacgaaagtgacctgcaaggagagaaatgcaaccatacatgggctccagtcaactatgggactgaaggtcctaattgctcacccaagggggctgcttaacacaaacagcctcagacccgaggtttagatttctgaaatatgcattttatgttaagttgggtatttttttaaaaaaagaaaaacagcaacattaataaaagaagtggtgtgtttttcccgtggccagatttttaagaaacttgaacatctggaagttgccacagacaagcgagctagtccagacacagggacactccaggctatgaaccaagccatggttaaaccaagacttgcctagacaatgcagaataactctcccatacagacttcttacgacaatcaagtgagggcctttcccttctctgaaggcaagtaatagggcagaaggtggaacaaaaagcatgagaaatctaaggtagccacatcccaaatgccagttaataagcaactagcttctttattagagaggagcgggtgaaaagtagtagtttaatgttcagatatacaatcatttaaaagtattcaatacatggtgtttgatggtaatggcaggatgatgtcaagtctctctttttttttttttaaaggtttgtttgagtcctatgtggaagcaaaaattcacaggtgaatttccgggtgtttgccaaactctaactaggtttccaggaataatgtgttcactctgattaccagggcatgcctcctttcctcaggcttcaagtgtgataagtcgtcggaatttgacccaagactactatcggcaaatgacaaagtgctttatcacattcctgctaagtcccagaattccacttacagccaatcctgaatgagactaggttttgtctaaagaatcaaggctcaaacgccaagaaaaaaataataataataaccataatctctttaaaagtaaaggaagcctagaaaatccatgttttgacttgtgttaaggtttacagatggtactcaatttacaatggtttgtcttgcaatttttggactttacaacggtgcaaaagccatacacattcagtacacccttcaactgaactcaacttaagatggggttacccagacatagacctaagttgaggagcatctgtaattgcagagttaagcaaaatattttaagtttctttaagtttcttatcccccactctcactttcaattttgtgtatttagataatctctccttcctttttcccttcaactttatgtggacaaaagcaatgcttcaagaaaagcctcaatctaaaagtttgataatgaacttgaccctccactgcccctaccccaacaacatgaagaacttgtctgttccacctagaaatacaaaagtgaaatacttttttgaaactgttgcctcttatcaggctgatatgtgataagaacacagtctaaagtacaaagattatatttaaccagtactttcctggtgttttaaccagccccttctaaaatacagttgttcttttatacttgggaaagcagcaagtcctgtgacagacccaaagtcactctagggagaaaatcaatagcaagtctggctgttttaactctcaacaccactgtaagggaaaacaagaaaatgtctagtttcccgaatagctctgatactgaaccattggctaaatccatgaactttattttcctaccatgaccacaatagacgactggtctttgcagcttcggaagaaaagaggactaatatttagaccccagctggctgcacatccaaatcttctatggaggttaaaaacacaaaagtggccatcccactccaccaccaaatttttttttttaattgagatagggtcttgctctgttgcccacactggagtgcagtggcacaatcacagctcaatgcaacttcaacctcccaggctcaagccatcctcccgcctcaacctctagagtagctggaactacaggcctgcaccaccaggcccagctaatttttaatttcttttttttttgtagagacagggtctcgctatgttaaccaggtttgtctcaaactcctgggctcaagtcatcctccagtctcagcctctcaaagtgctgagatgacaggtatgagaattttttgagaggaagtggcctttatttttttaaagaagactcataaggatttttgacaatcactgatttattgggtcactagtctgtgctaagtactctgccaggcatttaacatacattatttcacttgttttcatgattaaattcaggcaggttcaatcacagaaaccatgcagtggacaaaagagagaaaaagttcaccatgaggagattctaaaaacctgccttttgacttgtctatttttatctcttatttctcactttgcttctcctcccgcttggaccctttgtctgactgtttgaaattaagttgcaggtgaaccctccattacccatgtccagaacaaatagacataagcacagaacctcactaactccccaaatttttatttttccatttttatcaccacaaatttcttggtaacaatgtagaatttaattttgtaattaaaacaaaaactctcccctaggaggaatctgatgacataaggataacaccaagttatgtgcacaaacgacaaaaaatgccaaactaactggaatgatcatccttcctgaaatttctcttaaaaagcagagaagtagaaccaatgctgccacctagtggccagccaaacaaatcaggtagcatactggagaaaaaggtcatagtcccgacaatctggtttccctgcctattatcaagccacctaactccttacttttccacaaaaaaacacaaccacatatcttaagcaagccctcctccacagtcataatccaaatacttgaatacagcaaccaaagtctgtcttgttaaacacactacttctcatgaaactttcctctgcctattttaaggtaggtttgcccggtcctatggcccagtagagatgacacaggagaacacggaaacatccaaaatgttcactggttcagagtgtgtacacagtaattttgatgtctgttgcctcaaatacctcctcgatcatcgcagatacattttcccattgcagacgatcaagaccacatccaatcctgaaaaagacaaaatatctccattgatggtaacgaaagtatctaggaaactgctcctctcttttaagctatatccactcaaagcataaaaacaaataatctagtctgacacccttatgggcaaccatggtaggagtttggaagtcaattcttgttgtgagtcaccgaagaccattcctagacagctctaacatccaaaaactatcacttctgtttgcctaataagatactactttccaactatttcatgctacatttagaaatgtgtaactgtcatgacattagagactcattatccctctatgactactgactaaaattggctgtggatggatggtgaaaggttggtattttaaaaatgcacttatggtaacagaatgttaacgaaagtaaggagaagaggaatgaggtacaggatctgcaaaaaagaaagtcaagagggaatgctgggaaatggtaagatagttgcaatccaggagtaaggtctttgcaacaccctggtaagaataaactcagtccataaaactctactacttggcaccttccaagatgttactctagtgatcctcaacacgcctagggaaaaaagagacctaaaattggtaatttcatgtcataatgtgataattaagtccataaggaattgtgattaaaaaaaaagtttctgatatgtatgtacaccataaatatatcaaagaccagtgtaaaataagggacatttgaggccatatgcaaagtaatgtggggcgcaagataaaactgcatgtatgctcagcattgactcaaaactaccagggtgacaggaagaaaagaggtgaggcccatttcctgaaaagaaagcaaagggactactgaaccctcaatgtcattccctaaattcccaatagctaaagtctaagaagttacatcagggacagatcctctggctattacccatactgaccaaaacaagtgtgcagtataaaagggaatgataatttacaactttcttgacgcaaagtaataggtttgggagatgggaagtggtccaagaggaaaaccaccattgctcagtcttgattctttagcttacattgctttaggaataaaggccaagcttcaagcagagggtgctgagaattcaacaaatgtagctgaatgacaatggtcgctctctgctaagcaggctgaggcagatgtatatttcaaggtaattgtcctgattcattcaactcaagctagaaaatggctgtgccttagtctaaagccagacaactggttcactggtggttttacaaaattttgacttttgtccacctttaaatctatattttgggttaagcttttaagttgtttgtctttgggtaagatagtaaaccccaccaatcaattaaatctccatttaggaccatggatttccttgcctgggcatggagaggtcagtgactccattcttcagacaatgagacttcattgcctctaaactcttctgtaagttttcataagttggcttgtgcgaagcccttttctttgtaatctgaacacaaaggattcaaactttcatcatcccaaaatgatagccaaagaaaagtcatcacattcccccaacatcccaataattaaaagagtaagcacatttttatagaattagtctagagcaaggatgacaaatgtcatattgccctttccacactgttatgggagaccttcaagaaaatccactaaatagaggctgagaaacccagactctgccacgtagcaatctttccttttcctaggaaacccatgagattagcagatgatgcctattgtcaatatttttaagcaaggtaggtgaagtctctgtgccacttccaagagataagctgcatatctctaacagggaagaaagcataccacctgaaaattccctgctaaaagcctctacttatttagaaactgtgcttgcttgctttttgtctctctacataaaacaacagaaaaaactggtagggtcccaaagtaaaaccactggaagccacataagctttaaggacagaattcaaaggggctaggacatctccccactcagtttgtcatccagatcaggcttgtagtgggttagctgtaagctacccaccaccaccactaaggaagccacaccctttcagggaccaaatgccatcctggactgttgaagaaccccacattcaggcagtagttaggagaggagctaagtattatttgggactgcacttattattttttgtttttattcacccccttgctatcagtgtgctatttgacatggaataagagaaaagctcctttgggaaatctgtctcttgagacattattgtttttatctcactctgcctaggaaatatagtatggcaggcattcctaacttttgcaagtcttagaacaggcctatggtacatgatacacgactttcccacagagctgggatgcagcctcacatttctttctaacccagtgctccaagtagccgccatcactggactggagttgtcataagataggaagctttttgacattcttagttgtctagaatagaacatcatgatcaacacaaatgcagtgcagcccatctgttcacaaatccttaaaatgtattaagaactggccctgaaaaaaaaaggaattggccccatcttaccaagtaatatatatatcgcccatctctcttcagaacagccacttctccagatttcttttctaagaaaaagttatttaatagtagaaatgaaaaagaaaaccaaacactgatctctaaagattttaaaatgtttacagatctgagtttacctcagaactagaattttcaacactgaagaagggaatagggaagacctattgtctcccacaaacactttgctttttatcagcattcccaaatactatattccttaacttaacagctttcttacagtcatgtttcctcacaacccatcttttgtaccactactacttttaaatatatcctcatttgtccacaaactttctctattgccttgaaattgttttatagtgtgtagttttttacttgccaaatgtgtatttactcaataattatctttttacatacaaagagctgtataaggcattatgaggaatacagatatataaaaaaggaattaattattacagagttttcaatccagagaagatatcatcattccaaataactataatacaaagcagtaagaattgcttttgtctaaggctaagaatcactgtggacactgatgctgttaagcctggaatgtggtcggagaaactgttgcagaagctttacataggattctagtgcacatttctggtttaaagtggcccgtagaaagtgatgggaggggtctgtaaggaagaagaggtttctaaattcctctttgaagagaaagcagaatattggtaagtaaaggatcttgaatgccaacctatagactaagcatctcagagttatttcaagtttcagagaagtacagtaatatcgtcaagaaagtttcatgatacaagaggaagagattaaaaaccttcacaggagttgggttttgatatggtaaacgtctaaactagaggccattcttggggaggaaaatcttaaaaacatttggttcttaggaatcccctctttacacgcatattttattaaagtgtaacagattaaaaggtgctctagccagggcaaaccaggtaagtggtttccaaaactcacgttgatttaaaagttcttgcacccctccaaatttcttcttaaagaggacagctatcccagcgcccatgcgacaatcctcactgatacagtgggctaaagagtctgttttcgggcatgcaaaaaggtctcctttcacataagtgatctaaaaaatgtgcaaaggaaaagacaatgttttattagatacagtaaaatactaagctatttttctgtattttgtgtcccccacgactacctctcccggcaccccttcctccaatctgatttaaagccaaaccaattacagcatgtgtaaaaggaaagtaatggatgatccctgcctagaattttgagcctttttaaagtaaatcagctagagagaaaaaaagataatgcaatcattaatttaattaaaaagtgtttatgcttttgacctccattattacgaatttcagttcaccaataagtcaatagttgttacgcactctgcttccttctggatcttcattaaggctgctggccatgatactgagtcgctatttccagaatttaagtgtttcttcagctatgagaagggaaaaggaagtaaaaatgcttaggcagccttagtatataatattctgattgccctgtacaaccacttaataggcttttttccccaacgtttatcgatgaatgtgagtttgttcggcccctgggacgtaatacaaaacccttctggggcaaagaggaagaacgcttaggttcggaggctgtctcgacccgctctcatttcgtgctttcctggagcgccccgctccgtcagcggaagcaaagcccatccctaagacacgcctcctcctttctccagggccactccggagcaaggccgatttaggacggtctccttttctctgcacgacgcaaaagtatttccccagtgggtctggcttagaagaaaacagaagggacttggccacagtcccgttaagccgcaaccacagagtgtacagggtactggcgtgctgagccccaggcgtggggaaaggaaggcggcctctcaaggaacgttcaccccccacttttttggggggtgcgtgggagaaggaaagagtctattgaagcctcccattctctgtctcctaccctagggcgggtcagcgaggacgcagtctgtcctggggtcctatgggagggtgcggggaggctcgctcaaagccccaacgtacccaagtcacccttcacctggaaaggagtcggttgtttggaggtccccgccccgcggggaagggctccggatccgaccctggtaggtggggagcagcggaccagcccaaacgcggagccaatcccgccaaagcccttaattgcacgcatctaagatggccgcccccgcccggtagcggggcggaaacgagcccctctagcttgctagccgagcccacactctttggcgaaggccgccgaacttccggcagtaaattccgtggtttcccgccgccgcccgcgcatgcgtaacgaaactgccccacgagtcgggaaaagtggcgcttgcgcattagccgcaggggtgtgtcctagtggccacttggaaaggggtgggcagctggcaaaggggctagttagcgcctgcgtagtactaagctcaaggcagcgttttgagttgaagggtctggcgcgtctggaaagcgcctgcgtattcctttcactgggggtggtgtcaaagcgggaaggtgggcgtggcttcagggaacgcctgcgcgttgctcctccgaaggggtggggcgatccctgaactggagttagtgggcgtggcctcagaggcgcctgcgcggaggcggttggagggaggcccgattcccctttgttcgggttcgccattttgctaggcagcggcagtggcggcggcagcggcggctggagcctctgattgggtttcggagtccggtactggagccaatcagcgcgggcagcgaaccgggggagcgaggcacggtgagtgtgaggagccaatatccagcggcccagagccggccccagcgccccgattggcgggtctcgctgaccactcaggagaggcccaggcgcccgtcgagcccggggagtcgagctgagcctagccgagccgggcggccagcggccccggcccggggcctgcgagcgcctcggggcactcccggccgaggcctgcaggggccgccccgcgcggggatggcgcctcggggagcaggcacctcggggctccgaccctcgcagggtgccagggccagttgggaatgcgtccctgttccccgactcaggcccaggttctcaggccccaggcctggggccacgaatggccctacactaggggacacatgcgcgccctgggcctcggcgatttcctcctggtcgttctggccgcaaacttaaacctgcccttgcactctccactctccggcccttgggacaggaagcctccccggggcccgcgccccccgctccccgctcccagcgagccgggtctgtcttatctgcagcccctctaggtcgggagggaggcctggggagggtgcgcgccgcggccgcggggtcccgtgtgcggctggcaacggggctggcccgcccacgcctcggagccctatgggcccgcccccgctgtctccctggtggggagagggggccgttagttcgcccactccccctgctccgccgcgcccctcctcccagcccgctccgcccgggtctccggcccggcgccgttaccaccccttttggctcgtcatttcctctcttccccgccccgttcgcagtggcaggaccgcacacctccgtcttggagcccaaccaagcggtctccgtttcttgtccgggctgtaagaccagtccattcggtgcctggaacctcactcttagaagattgatacccttgcgcattctttccggaggctgcacaacttgctgttcatattactaatcttatccactgctcattttgtgaaatctccctcccttgggaatatagtacagttttgggggttttttttccctttgtttttgccttcgcctttctatgttactttgtgtcaggcttgacccagtccactcatctcttggtttatgtttttctgatacactttcaagtcctgtgttaacgttttctcagcagatgtttagaaactaacagtgttgtggggttttccttagggtgagaggttgctgttggcaaccaattatccagcagttagtatatgccaggtataatccgtgtgttagggagggagtacgtagaggtcaataagaactgtgcctacctgatggaaattgacaggtgaacaggtagttaatacctaacggttagtgctataaaggggccaagttcagttgctgtgaagtatccatgcgtgagctagcctccgtgaaaggcttatcaccaccgcacttttgactggccttgaagaatgatggtaattcttccacaggaaagatggaagagcttgctcgaagagaagaaaagcatgtgcagaggaatcaaattacactgttggaggcaggaagatgggatagggaagtgggcagtagttgtgatagtttaggggggaaagcccagttggtaaaatacttgtatatcttgctaaggaatattttggaaacagttattattttgtatggaggttcaagtagaagggatctagagctatattttttcctaagattgaaaaaacgagtttctgacttgtttatgggttctgccccgtgatagtggctgagttctttggggatgaagaggagacttgtcctaggactctgaaaattatttttactcatgtgaatcatctagtgcattccctggcacataaaggtcttaagtatctggtgcccatttctaaattcacatttaatgttatacaactaataggtttcagaaaactcgtattccagtgctctttcattactaaaacttcggggacaggttttattttcactttttagggtgagtttttcattgttgcttaagtgattttcttaattcatttgattgtcacgttatccgcattagcagatgagatgatagagcttaagtagtctaaaaaacatgtatatttgcctttggaacgtttttttgtttgtttttggatacagggctttcctctgtcatccaggctggagtacagtggcgcaatcgtagctcactaacctggaactcctgggctcaagccatcctcccttcttgttctcccaaaacgttgggattacaggcatgagccactgcgtcctgacctgaaatagatgttttaaccttagtatttaaaaataggtatgttctggtcacttcaaaatcactaaatacttttgcttggcatctttctaaaaggcattataatctggtaacttttttgctaaataccttacaagcttccaccagtctgcagaagaatttctttgtctgacattttgagagaaagtagtgtggccccaagctttttttcctgtttagtccactgttcacatgctgaaatatttctgttcttgtttttatgctctcttgatttgtagtacttcaccttcctccacatcatcacatagctaaatctttctcacacttaagaccagttcatcctgcaggcctctgatagcaaagaaaaaaaaagttcaagtagtacctttttttttttaagccttgttgatttatccccagctggaacaaatctctgtcctccaaattcccatatcactttatctcttaggattccagtataggtttttagtccattactaaacttaaagactctttgaagtttgaatcttcgtcagagatttctttttatttttaaaaccttcagaacagtgtctggcacatggtacataattagtggagagaagtgcattagaaagctccaatccagaaatctgtaggatgatggggaagctggacagccctttgttgtagtctagtctttcatcaagcgtctatcaggacccacttgttgagttgtgaaagaaattgagtgagccaatgctgggaatttttaaataatagaatagaaaatatctgccaggcatgatgatggctcacgactgtaatcccagcactttgggaagccgaagtgggagaatcctttgagctcaggagtttgagaccagcctgggtagcatagggagaccccctctcttaaaagaaaaaaaagaatagaaaataccaaagtgcatcttgtgttgtataaaggtaaatgctgtttcatgaaactttcatttcagttacatgctttatacatgtgtgcactgagttgtgataatgaaatgtgtttcttactaagggttgtggtcaaaaaagttaaaaagctactgttctaggctttgcctggtagtgattatcaactgtgataatcctatggcttttcatatgcttacactagttgagtttctgaagaggttttagctttggagtttgtgtaggtccacatagaatgggttcctagtaagtggttggctaagtctcagcttttgcaccttggaatagtggggcaaagagaattgcactgagaagagaatgcactaggaagagaattttcatgctagccagaataaacacttattatttgtttctctctctttgaggaaaaaccattcaaaactttgtgttaagagcaagagctagacagactaaatctggcttagtttgtcataatcttgggcaaagaggcactttgggaaagactatcgaattgtattgcagtcttgctaactgaagctcacagtagtaggaacatatgactttactgaagccagttgcttatagcattaaccattaacagtatcaatatcatgatacaggctaaatcactctgtcattaatgtgagagagaattgctgctagatttgaagctgctcttcaaatcttgatactcttcaaagtataaatttaaatattgctaaattggttcatttgtattaccagaataaactagttaagaagaaaatctgtacgttacatatattagtcattatgtgcttcaagttatatttagtcttgtaaagatgtaaacttctggatattagtcaaggaaaaaatctcatataagaaggaaatttggagttggggaggcgttgaaacctaaaagacattcctttcatgatccttattttttaaaatcaatttattgagagatactttagaaacaaagtataataattttaaatgtgtattttgatgagttttgacaaatttgtacacctgtgcaactgctaccacaatgaagatataaaacattttcatcaccctacaatgttcctaaggctccatgccagtcaacctccctctttcctgtctccctgtattctccactcccaaggaaccactgatccattttctgtctctagattactgatgtcttttggagattttatataaatggaatcatatatattcgtttacatcataaccttaattttattagtttatagccataaatgtattgtgtattagagacaagatagaatttagggaagcctgttagtgcccctaacagactcacagtctggctgaaaacctgattttctattctatacccagaatctctgaggagcagacttagtcaaccaattccaaagagactggtgtaaaaatcagaaaaccggtttgtcatgttgctgattatatttgctccctgttggccaatctatatgtaaatccaaattatagctagaaatttacctagcgagcattccattagatcaagggcagtgctttggagaaccatatggccacaagtcctcttgctgtgatgacatagcctgttatttatggctcatagattcttatgttgtatccattttggttatgagtaatggggttgattaatttttattttgattaaattttgttatatttttcctaacattccaacattcatttgggaaataagaatttctcaaaattcttattctagaaataagaattttcaagtgtgcagtgaaatcaaaggaatttgaaaataaacacctgtatacctgccagttagggtctattaacatcttactataattgccttaccagatatttctccacccattcatccattttttgatgcatttcaaagtaaattttagatatcaatacacttctttctaagtacttggacatatagttgcacatattttggtttcttctttcacactgtattgagacaccttgcaaatgattaattccaccagcatgtgtggatttatggagagtggtactgtactttgccacgataatgagcagctcagttaggtcacgtcattttattattcagatgttggaatttatgagggcctagtgaaaaatcagagagaaagacctatctacatttttgtttatatatctgtcctccctcccatatttccaagatgaattgccgattgctaacttatatcattttaattttttaatgaagtctttattaaaggttctcagatatcattcagtttatctaattgtatccttatttttaaaagtggatcttcaactcttaaagtctatgagaagggtaaattttgcctaccatatgtagtggacctgagtaacatgtttggtgggaagcaattacgtgttacaacttaaagaagctttattctctaaagtatatgtgcaaacctgaaaatcagtgttaggtatgccttgtatcaaagtgatgtagcttaacgagtatctcttaggtgcaagtattgctctgacagtattgaaaggtaaggttgccagtatactgaaagcattttagaaacgtgaaaatagcattatgttgttatgattgtgccatgtaatcccagttaaaaatgatactgaatataagcatttcctattctcctatcctgttttcttgcaaataaagtacagtgataaattatccaggttaattgtctggtaaggcctttattgacaatctcactttagtttctttccccacctttctaacaggagtgtacctcacagccttctaggatctccagagtggacaggaatctcacttggagggaccatggagcagtatacagcaaacagcaatagttcgacagagcagattgttgtccaggcaggacagattcagcagcaggtatggaagcaaaactgctttaaacattacagcaatgaaactgataacagcaccactcaattggttggtctattgccctggggaattatttgaaagataccagatcttgtgagatattgggtctgatggcttgtgctgaaatgccatgtctagcccatgaccacttagaatctactcttcatgggtgcctggttatagtaaattgcctcttttatctcattttaagtaaaaacatctagtctggttttcagatggaaatttggactttaaaatttttctggattctatttggtctttttctcttcttgtttgagctaacttgtgatttagtaagtctttggccacaacagacaaaccaacatagcttccaataaatcttctgttttttgatttggtctgccacattttttattcagaaaagctctggtttaacattaggataatatttagacagccattcttatggataagacatactagaaaggaattccctgctgctggtttattcctaattaatagattgctttcttgaatttatacacaggttacattttctgatgctttatgcttgggtttattatagtaaaatttcacttttttccccaccccagaagaaaaaaatgtattatgtttctatttgaccttaggccaagattgatattttggaaatactttgttttcaaaatggaatttagctaatatagaaaagtagtagggaagggaaaggtagtattgatgatgagtttttcccgtctaatgatcaaagacgaactcccctgatagctttcccttccatacagctgctgtggctctggcagtttccttcaactgcctttttagaggaagggattccacaaagggccctccattcacaccagtgccctggagggtgggtttttattctttcagaatttgccattagtggatgtaaaaataaggttgaatcattgaaaacatggctcttaaagcagtccagttgggtagaaataatcttagttttgaagctgggcatggtgctgcatgcctgtaatcccagctactctggaggctgagacaggaaggttggcttaagcccaggaattcaagaccagcctgggcaaaacagcaagaccccatctcaaaataagtacataaataaagtttaaaaaaaaaagaatcttagttttgggacatgagagcattgacgtcatgaagatgatttcggttcatagtgattaattactcctcctttcttggtgattgcatttaagcccagaattttttatggtagtttcagggctattaaaacctaatcatttttttcttgtgaactcatctgaggagataaaaagggcattaaacaattgtgtaagtagaagtgtcagattcctgtttctggagggaaagattgcattacaaatctttgtgttaatgatgacaactgttttgagtttttgagtcaaatttttgaggtccactctggagacaaagggctaatatctttaatcctactaccttcaacaaaacagcttcaatatagggagtctgtacattttgaaagtccttcaggcttccgtctctctcctccaagaggtaaggtgatctgtgtcttgaactacacatttccttcctgacatatttcaagctcttcctgttcctgttctcagcagcagggtggtgtcactgctgtgcagttgcagactgaggcccaggtggcatccgcctcaggccagcaagtccagaccctccaggtagtggtaccctctctgattctctgtgagcactgcatgaacttctcctctcctcatgtctggtgctgtttgtgttaggatctccagtaggaatggcaaagtcagttgcatgtctttgatgctgctaacttgtctttgaggcttataagatgccagtttcctaatatttcatgccaagtcatatagagaccccgtatcaactttctgagaattggatttgactagcatgtttctttgagaatgcctggaaaagaaatggtataagtgacaggaagaaattcttataagtgacattagaatttattcagggctcggccgggcgcggtggctcacgcctgtaatcccagcactttgggaggccgaggcaggcggatcacgaggtcaggagatcgagaccatcctggcaaacatggtgaaaccctgtctctactaaaaatacaaaaaaattagccgggcatggtggcgggcacctgtagtcccagctacttgggaggctggagcaggagaatggcgtgaacccaggaggcagagcttgcagtgagcagagattgcgccactgcactccagcctgggtgacagagcgagactccgtctcaaaaaaaaaaaaaagaatttattcagggctcacactctgatccaattaattgcatggtaaaaattttgtgtatttgtgttacaatggagaaggaaatatatacatatacagacacacataaactaggctaggctgtgctttatttttattcaaggggcaactcaactgaaaaataatcattgcacttggcaaggtttatctaagcactgaatcttgttaatctcttgttaactgctattgtttccactacctttcctgggggaatagtgacctgtcttattactagatctgcaaagattaccccagatacctcttggttaggcagaagcaggatgtgctttctgtaagtcttaggtgttaaagccactgtgataattcttggttaatcaatacagttctttagcatcgtgtatggctaagtatcctaaattgggttctaatttggccagttcctataaaacacaggagtagcagcactagtctactctgtgtatgtaggttacttttattaaaataactctatttttgagaaattggcaagatttgggtaccctactttttccctccattgaattagaaatgattcaaagtagaatctagaatgtagaactggcatctcactttattgctagtgctgctaagcatccagcagataactacctcttattgtcatcactttatcctttcaatcccacccctacccctgccaccaatagtgtttggtaatgatgtacagccaactttgaacataaattaagccgaaagaaactgagcttgtaggcattccaaaattgtgttcaaatctcacagtccaacagcttgttaatgtttttcatgcttgcttcatcttactcatatataaaacagtattttggattgtcattaaccccttgtggaataggaatgtaacatgctcttaactgtatggcttcttgtttgatgcatgtgtctttgtaacatttttctgttgtaaatacagtgagctctttggagtctcaaatcatttatcatgtgcacgaatagcacatcaattggggaggaaattaagatgatgaatagatagaaaattattaatagctgtatcttaaaacttgtgtttcctacttacatagattttatttaaaagaagtggaaacactttatggaaataatagaaacctttcctctagggatctgattattttgggagaattttaaatagttattttggttattcttgctatatgtattctgagaaatctttcttgatacagaatatgcaagcatttggtgtagcaaaggggatttgatttggaatggggaaataagggaaagagatagcatgagagagtcaggctgtaaagtccttaaaaaagtaaagtaaaggttctcaatggacagtttaacaaaacttaggatttcaatgttcctggtgattctaatacattagtggtggtggcagtggcggcggtggtggtggtgattgtaggaggaccttactatctaacctactcatctaggacagaatgatctgttaactaattgctgttacttgcacatactttcattaagtgtgaatatttcagtcatgaatattctgttctaagtaatttctgtcaaagatagagtctgaaaatgaaaattttggactattccatggatcattacagtttacttctaaagcacttttaaagtgcttccagaaagcattctattaggtatttttgtattgggacttaagatgtgacagagcacttgtagtgacctggctcctacagtagtctgtttactcataggagcttgaaatttgtacacttgactgctctgtgtaatttcaatatttgttgttgcttctgataaagctaaaataaccatgtggatattatagaggccagtgaggaattccaccatggagactgcaaactgaccagaaagtgcttttaagaaatctttagtagtgagtttaaacaacaaacatatctagaattcacagagtaaaatgagcaggataaaggtatacatttgacatttcattttagcttgagagactgtagggaaaaaagggtcatcctctacataagcttccagagctgcttgctacccagcctcctagagtcattgctgggtacagtttgatttaccttcttcactttatttagaatttgtactcaaccaccatcaccaccatcacctttccctctcattgccttctctccagccttcactacagaccattcctggattggtttaaacaggcaactaaccttgccattatgattaaatgtttgtcatggatttagcccgtgtttggtgacaaatgccttatatctattgagacttctcaaagactctggatattctccattatgtctgaccttaaagtattgagcttggcatttagtaacaggattcatagatatttaaagataacttgaggacttgagacatatattttcttagtcttttctaccttttccttttctagcaaggcagcagaatagttccagtgattgtcttttggtaaaaaccattttgtgtcttatgttatttcattgttcttattttatttcattctaggtccaagggcagccattaatggtgcaggtcagtggaggccagctaatcacatcaactggccaacccatcatggtccaggctgtccctggtggacaaggtcaaaccatcatgcaagtacctgtttctggaacacagggtttgcagcaagtgagtaatatttaaaaatattgagcagtatatcagaggagaggtttcaaagaatagattattacaacctatttgataattgatattgcatttaactgcttcctaacccacattttgcattcagttgattttctgcctttatagtaccagtgatataaactagaactatgcagaaattggacagctccagtaatgactaagatattaggcatgatcttgaattgctgtaaagtatatgaagaggttagaatctagtttatagtatattttattttaaaagaaacaaaaatgagtatttagaaagttagaaaaataacaaaacgagcaaaaagtgggtccaaattaattaagtagaaaactgacgtatagaaaggataaataaaatctagattgtttaagcagaccaataaaacaggtaaatccagttgaaacactgattgagaaacagaaaacaaaagtaagcaaagatgtagaagagattaaaggaaggccaggcgcagtggctcatgcctgtgatcccagcacttggggaggccaaggcaggtggatcacttgaggccaggagttcaagaccagcctggccaacatgacaaaaccccatctctactaaaaataaaaaattagccgggcgtggtggcacgcacctgtaatcccagctacttggggggttgaggcataagatatcttgaacccaggaggcggaggttgcagtaagccaagattgtgccactgcactccaggctgggcaccagagcaagattctgtctcaaaaaaaaagaagagattaacagaaatatgtagaaatgttacatacaactctgtggcatcatattttaaaattagatatttctcatcgagatggcaaaaaaaaacaaaaagtcattatatccactgttaggatggatgtggagaaaaagaattaatcattatttttggtaatttaaaactgtagagttattttggaaaggcacctcactatctgttaaatacaatgaatatttgagctagcagtcccacttctgagaatctgtcctataggaagaaaagcatcaatagtagggggaaattacaaagacacttttcatagcattgtactagcaaaaaataaaattgcaatctgagtgtccattaataagaataaggaaatggttggaataaatcataatatattcatagggaatattgcatcatcattaaaagaaatgaactgttgacttggggtgggttaatattgaaatatttttagtggaaataatttgcagagaaatagtgtgtgatctcatctttgtaattcataaccaaccccccatgagtatatgtttatagtcatggaaaagagagtatgagataactattagttactctatctaaatgtttatattgtttcaacagttacagcagtcatattaatgtcttagttttctggaggaatttaagttgaaaaaagcagccatgatcccactgctcataaatcaaacttgtactttttgtgtattcttttgtgtttttatgcataatttttgggcataattgtaccatgcatgtggggttgtgttttcattttttttttttaattctttcataatgttcagtcaacttgatgaatcagaatttctaatttataaaatatagttaaggattttggttttcatttgcctttgtaggtaaacatttgggcacgatagttttatttttcaactgaattctcaggataatttctttggattggggattgcttgggtaaagggtaagagtatatttgagcccactggcatatttttgccaagatagaattgtacttgggattaaaaatagttttcacatttctctttgcataaatatatgaggctttaaatatcttttcagcatgtgctttccttgattccctattgctatatcctttctgttcttctctctttgcttcctctccagtcccccttgctgcgccttctccactgttgagtagagacaatgtggtatagttaggaacagtatactgtgagtgtagtggtccaagctttcattaccaggtctgccattaaataagcattctgatcttggccaagttatttaattgtcggtttgctcatccaaaaataaaatttatatgagatgatatctagggttcattctagctctaaattctgtgatttttatggggttttattttgctataaggaaccttcaaatagttatttccctgcttccaagtagggctataactaaccaagctgaaaaaaatatattctgttacgtaaataaagctctctaggtgagattccatagcctcccttacaatacttaaggctttaatcccctttgtataggagttttttttctcattagtgttgagtagccattttttaaagaagactacttcttaaccttttttgaattgtattctctattttagaatcctagtaaagcttgcaccctctaagaaaaagtagagatgtccagtctcatgaaaaattctgcatataattttagattaaaatccttggcctgagaaagatactggaaccagagagacagccaagaaatagatagaagaatattggaagttggcatataataaaagtggtataaacatatcaatgaagaaatggctgaagaatgatacagaaaagaaactgatttctaattcatactgtattttaaaaaatatttgctaggtggattaaagatctaaatgtagaaaagtaaacttggaaaattcaaaagaaaatataagaatttttatgctatagagaaggatatttttaaaaacaaattgactaaaacataatatgcattgaaatacatcaaataaaagtaaacaaggtgaaaacttggaaaagatatttttaatacatacaaccgagtttgtattcagaatatgtataaataacgtttatgtatttatacaaaaataggaaaatgggcgaagaatatgaatagatggaagaggaaatcctaacagccaatataaacttagaaatgaagttggttcacataaccagataaatttgtttacttatttatttgccaatactttctgaatgccaattatgagctgagtatttggaaaaaataattcagaagacctaggcaatctatcccctaacaaagtaggatccatgaatgtctctaagacatggaacccattgacctgtttttttcaccttccttccatcagtagtcctttttcctatcagctggtagactttgtgataacttaaggttctaggcatgttcttctttccagaccaaggtggtcccaagttgaaattatggatggaaagtgacctggctataaaaatctatctttctgaaagtatcctccttccagactgccatctatgttgaagcaatgctcaaataaaaaaagtttgttgatggaattaatggtcaaagaagcaaagagaaggttacttagtactagccatgtattctggcttttaagtttgggaggtattcttgaatataaaatacaagacattttgagctatggggctctcctcactgctttctcttttgcacttaaaaaaaaaagtgttcactagttatatgaaaataggattttgtacacccaacatttaaagggttgtattgcagttttttagttccaaaatttagagaaatatttttcaagcttcttgtcaggtttctgataacactcctaataaagtggctatagccattaaaaaaaagaaagaagatagatttggatagcacacgatcccttgctttccataattgctttataaggtttagctatccaatcctaggaccaaataggagatacaaattaaatcaacaaaaatttgacaaacattaatgacagtagtgagtattggtaattggaaactaataggaggaatataatctgtcacattgccttaattatctattaccatataacaaattatcctagaagttagcagcttaaaacaacaaacatttggccggtgcggtggcccacacctgtaatcccagcactttgggtggccgaggcgggtggatcacaaggtcaggagatcgagaccatcctggttaacacagtgaaaccccgtctctactaaaaagacaaaaaaaaaattaagccaggcgtgatggcggacgcctgtagtcccagctactcgggaggctgaggcaggagaatggcatgaacccaggaggcggagcttgcagtgagccaagatcacaccactgcactccagcctgagccacagagcgacactccgtctccaaaaaaaaaaaaaaaaaaaaaatttattttatagtttctgtgagttaggaatcctgacacagctgtgttggattctttcaaggtcctctcaaggcccttatcaaggtgttgtcctgggctgcagtcacatttgactagagtagaatacattttgggttttttctttgtttgtttttttgagacagttactcgctctgttgcctaggctggaatgcagtggtgcggatcttggctcactgcaacctctgcctcccaggctcaaatgatcctcccacctcagttccccaagtagctgggaccacaggcatgtcctaccatgcctggataatttttgtatttttcagtagatacagggttttgccatgttgcccaggctggtctcgaactcctgacctaatctgctcgcctcagcctcctgaagtgctgggattatgggcataagccattgtacccggctttcagcatttttaatatatatagtatttcctctgtaaaaaagtacttcatcattcaccaaaatggcaagattaaaaaataataataaagcactttagagtgtattttatttttttatttttttgagacggaatctcgctctgtcgcccaggctggagtgcagtggcgtgatctcggctcactgcaacctccgcctccggttcaagtgattttccggcctcagtctcccaagtagctgggattacaggcatgcaccaccatgcccggctaatctttgtatttttagtagagacagggtttcatcatgttggccaggctggtctcgaactcctgacctcaagtgatccacccacctcggccttccaaagtgcaaggattacaggcgtgagccaccacacccagcccagagtgtattttaaatatgcatgcttttcaatatatataatcataccactgctatctttcataaaaaccgacattgatttgttaatatcaggtatccagacagtgtcgaaattccctatttgtttcataaatggaaaataagttgtgtctacttcataatggagggcagagcaggacttcttttttcctcttcagaacattttctgctttctagagaaatgtggataactctcggggaccaaaggagaccagtgtcagtagagtacaatcctttttttatgttcttttctgcagatacagttggtcccacctggacagatccagatccagggtggacaggctgtgcaggtgcagggccagcagggccagacccagcagatcatcatccagcagccccagacggctgtcactgctggccagactcaggtaattccactagctctgtcacacaggagcaaaactgatttggaagagtcagataactgagtcagatatttcatgtatagcatgtatagtagaaaaggggatgaaaaccataaaaaaatatatttttggccgggcgcggtggctcatgcctgtaatcccagcactttgagaggccgaggcaagctgatcacaaggtcaagagatcaagaacatcctggccaacatggtgaagccccgtcaaaatacaaaaattaggtgggcatggtggcgcatgcctgtaatcccagctactcgggaggctgaggcagagaatcgcttgaacccaggaggcggaggttgcagtgagctgagattgcgccactgcactgcactccagcctggcgacagagtgagactctgtctcaaaaaaataatttttttttttaaggactacatcgttctttgttagtatctttgggatctgttgaattgtgtcattacttatttcctccagacacagcagcagattgctgtccagggacagcaagtggcacagactgctgaagggcagaccatcgtctatcaaccagttaatgcagatggcaccattctccagcaaggtaagtgtacccataagcttccctaggactttttggggcaacttttttgtcccttagacaactgacatctttagaatttgagtggtgaacttgacactacatattttttggacaaaaaaaaaaaagatttcctctagctctccattgattgttggtttcttgtcaccatctgtgaccaacagtgattccatgtgtagcagtttctatagtggttgctaatctagggattgtgtaagcttttagggaagaagtgtttctaaacagaagaatagaaatagggagttcattggtaaagagagaaatagatcaaaaatcaagttggctttagagtgctattgctgcttatgtttttttctgggtcattccattactttaaatgactattatgtatacagcacttttactaagaagggtcctcaaagagcctctagtctagtaagaaagacgtgaacaaataaatacaatgcagggccctcatggaagtatgttctaggaatagataacataaataatagatgtttggtctgggaggaggagtgcagaaactgaacttgaaggcttttggaagcacctgttagtcaaatagttaaatcaaaaaaggacatctttgttagattccatgactttgtgattgcaaatttgcaatatacaggatccagagagtgcactaactgtgtgctcttgtattactccagggaggccctgaactggattgagcccaggcaagagctcaaacagaatggtgaacaaatcctcaagtgctgctattgatagtctggggacttggaatgcttggtttaattttaagttttaatactacaactgactcattgtcagtttgagataaacaaagtataagttttaaaatctctgtcctgaagcagattgctcattatgtacaagagcagtaggtatagctgtagtcagactgacctgtagaagaggaggcctccaaaccttttcaccttttgaaaactgctaaggatagagttactcaaaactgggacctagacagttaatagaatttcaaagattgtgattacttagattatatatagcacaccacagtgggagagtactttttctccccttgtgtttttcagtgtgttttgccaggatcggtgagtgtataccagatagaagagggactaactatgttcccttctttctgttctgtgtgcctgttttttgtttgttttatgttttgttttcttaaagttacagtccctgtttcaggcatgatcactatcccagcagccagtttggcaggagcacagattgttcaaacaggagccaataccaacacaaccagcagtgggcaagggactgtcactgtgacactaccagtggcaggcaatgtggtcaattcaggagggatggtcatggtaagaaaatgtatttttcagctttgtctttgaaattttcttgaacatgcaacttgatgcctcctaaaatttattatgttgacctcttgggattgagatcgatccttaaggcactgtcggtaatctactttgacaataacattatgacaaaccataattcattctgagcacctactatgtgccagggactattcaccagggactattctagatgctggagataaagcaatggataaatagtgattttatggaattcttttcagaattcaaataacgaagggaattatatactaatctttgagaagtggaaagtagtattgcccatgatggacaaaataagaaataagctaaaaattagaaagattgtaattgatagagaaaccaaaaaaaaagtgtcatgtaaatgtattgggaagataggaagatttgggtggtgtaactgaaagctaaatcctcatatgtcaaaataggatgttaaaatgcataaattaagaatgagtaacagaagtctgcacagaggtggaggaagctatgaaaagaaacagaaccaaccctggctcagtggcatgcacctgtagtcctagctacttgggaggctaatccaggaggatggcttaagtccaggagtttgagctcagcctgggcaatgtagagagacctcgtttctacgaattgaatgaaaaataaataatttttataaaagattcaatacagttattcaaagcggttgtatttgggaaagagctgtggggtacaggactctgttacttgtttttacctacatttagtacagtgttttggtgttttttaagaaaaattaggattgaattataagttaactattatttttataaatataggcatttagtagcacttggtctatctatttttgtgctgtttttttgtcttatgactactgttcctgaccattagatggcagcagaaatatctagagccatgggtggacatgaattagggcatggttatatagtttctcagagtggcacctgaatctcctatgacacagtcatctggggtgtttgtttaaagtgcagatctttagtataaatttctccagggatccgcatttacccaagtaccctataaaaattactttttgtggcatttacaaaaaaaatggatgaagaggaaccaagaaactgtttctatgtccatacttcatgccaccaataagctctggtttcctgttcacacagatggttcctggggctggctctgtgcctgctatccaaagaatccctctacctggagcagagatgcttgaagaagagcctctctacgtgaatgccaaacaataccaccgtattcttaagaggaggcaagcccgagctaaactagaggcagaagggaaaattccaaaggagagaagggtatgtataacattgggaaggatataggaaaggagaatagcagggttctacttttgaaattatcttttatatggcttgttttctcacgtaccttccaaacaattgacgttagatacttgttgtctcttttgtaagagttagcatttgttattactaatatgcagctgcagttataataacgaaaacaaacagtggcttaaataagatgttattccttttcatacataaaagtagtccagagataaattatcctggactggtagcacattttcacagttctcaagacctgtttcactgctttaatattgctagtgtgctgttcatggtccaagattcctgcttaggctccagcctaggaagaaagggaacaagaaaggtaccctttcttttttttttttttcctgagactcagtcttgctctgtcatccaggccggagtgcagtggcacaatctcagctcactgcaacctgcaccttccatgttcaagtgattctcctgcctcagcctcctgagtagctgggattacaggtgtgcgccaccacgcccagcttatttttgtgtttttagtagagacggggtttcaccatgttggccaggctggtctcgaactcctgacctcaggtgatccacctgcctgggcctcccaaagtgccgggattataggcgtgagccaccatacccggccaggtaccctttctttcaaggaaactttgaagaagttgtgtaccttccactagccggaatttagttacctgatcacacctaacatgcagataaggctaggaaagtccagcctggtgtggtggcaaatgcctgtagtcctacttggaaggcagaggcaggaggatcacatgagccgaggaattcaaggctgcagtgattcatgatcatgccactgcagtccaacagcaagggtgtcagagtgaaaccctgtttctagaaaataataataataaactttaatgctaggaaagtctttttactgaacactcatttgctcaaacgaaatttggcctgttattaaagcagaggaaagtgtatatattgtgaagtgtaggtggtagtctgttattttttttaaaaaaaattcatactataagcattcacagtcttacagtagttatatatggttagctatattacttactaggtgttttctccaaagcttccatcgtcattctaagtcataattgtcccttgtgactttgatcccagctgtcttaaactttggagaatggaatttgtgcactagataactgtgctggttctggatagtattaatagttaaatggttttatttctcgttttagaaatacctgcatgagtctcggcaccgtcatgccatggcacggaagcgtggtgaaggtggacgatttttctctccaaaggaaaaggatagtccccatatgcaggtaggaagacatatacattttattcttctctttattaccttgtattgacttgagttgaagccttcagcagtgtcctcttgctattttcctactctgggactactcacattctctaaactggatgcaatcttatgtctctttagattatcttttatcttaaaaccactaggccagacttggtggctcatgcctgtaatcccaacactttgggaggctgaggtgggaagcccaggatttcaagaccagcctgggcaacatggcaaaactccatctctacaaaaaaatacaaaaactagccaggcctggtgatgcatgcctgtagtcccagctacttggagggttgagatgctcttcgtctttgtcacttattactattcattctttcttgaaaatcacacttttcttaattttcaaggaacaagttttatttttattgaacaggttttattaccccatcacaaatataatttgaatgtttacttttttcccttctaactgatgtgagcctggtctaatcctctcttctttggcttagatttataaaatagctgcttaatttggtttcccttcttccacttttgttcccctctagcctactctccacatcctagtgtgatctttttaaaatgtttatcctatcaagtccctgttctgctcaagctccttcaacccctaccctttcccatttgcacttagactgacatccaaagtgcttactactatgcccagcaaagccttacatgctccagctcctgtctacctctaactgcatttctacttcttggtctctatgctgctgtttactgttcattggtctacttcctgccacgggtctttgtccttagaattttcagtctgtatgccctttatctttttcatgcatgtctatctccctatctgttaggtctgggtttaattaaataccctatctagaatagatctcttctctctcagtatgttcttacaacatcttttctttttttggaggcagtggtgtgattatggctcactttagtcttgacctcccagctcaagtgatcctcccactttaggctcccgagtagctgggactatagccacgcaccaccatgcccagctaatttttaaattttttgtagaaatggagtctcactttgttgcccaggcaggtctcaaactcctaggctcaagcgatcctctcgccttggcctcccaaagtgctaggattacaggcgcacaccattgcacttggcccttttctttacagtgtaataatatttaagttgttgaatttttcaagattgtttccttcactagactgtaagttgtatagagggtagaggattgtttcgttctctgttatatttattggacttaattctatttaagtaagttgtatttaagtactgacttagatgtatttgttgggtttagtatccagttctgaaccaagcaatcagtgtttcttgaattaatagattcctcccatttgctgatactccattctatattaacatcacattccacttgcactattgcaatatccatcaaattaatctccagtctcctctaattggccttatatagtacttatacagtacatggttaaagtgttttttttaacctgccagtccccaggtcaaggatgcatgctattaatagttctcatttcttaactgcatcaaatctcaaactatttctgtataacatctaagcaactttgccttatcaccccctcaacaatcaaactaggtttcctcagtgtccccacacatgaacactaacaactctttcagtgctattaatcctcacctgtagtgtgagagcccctcctttctcattgctattcattcataacggtgtatgaatgtgggcctgacagctattgtggcaggagggcattgtgccaggaactctcctcattctgtgtgctaacaatatgatcttggtcaattcagcctcttttatttttatctgtaaagtggaatactgttgatacttcacagcaatgttgtagggatttcattcagtaatccacattaggcatctgtgtagcaccatacctagtgcatggtgagttcagtaaatgctagttgtttttgctcattgttcaagacccagttccagtcttccatctccagaaggctttcagctttttctcagatcctgcctaccaaggcttcagagccttggtatgggggaactaaaggtggttcttgcggagtgttgcaaaaagcttccaaggatttatccttgtgttaacacggtaggtcttaagtgagaaacagcatatagagtttagtggaaagaagatgaaatgggagtcaggagatttgggagttagcccttgctggactcctaactttctgaccctgaccctagtccacgcaaatcactttacccatctggccttcagatttatctgtaaaacgagtacattaaagtgtatagattctaatgattctttctagccctgctaagtactcagtatttaaatgatgatcaaaaaacagtgacaaaaatacagcatgacatggtttctctgggtcttttccttagacacctgaatctgaatactcttaacccttaagtatagagaacaacacaaggttcttaggaaagagatacactaacagccctgcagtgtttcaccatggagtgcaggccagactttaaattattttaagaataaggtttattgtctcttctttcctaatggggctacactttaagccatgtatgcagacttaagatgtattacaagcctttgatttacttggtaaagttatgtgtattctcttggggggataagtagtgagagccatgagttcctgttgcttttgcaaaggactttaatcatcatgtcatctttgtctctaggatccaaaccaagccgatgaagaagcaatgacacagatcatccgagtgtcctaaccccacgccatgtgatggagctgatcaaggtcatgtttctcactgttccaggaaattgatcaactcttccaatgggacattgatgatcacattctgccctttactacaggacagaaaccacttagtttttaataagtggctcagtattacaattgcagcgatgcctggcaaattgaagttgcaagcctttgtcttactctttcagtcaggacctatttcagactgttgatgacattgacatttcatggattcggatgatgcaaggagacacatgccaccccagcagtacacaaagcacttaccttgactggtgaagtcagccagccatctcagcagggaagaacaaccttctcaaccaaaactgcaatcaggaaagcagcagcccactccttcccatggaatctagacagcatttatccctctggtgggggaatctcacactgactaactgaatggacgctttgtattcagagatggcttccaggcaaggaagttctatcttgtgatacggaaacaataaattcctgagatacattcttccaatctgtggtaataataagaattcctctctgcccagatggtaggttgatatttctggactctagccaagaaaaagctaattctggggatagaatgataaaagactcaagcactaaaaatatacattgccgaatctctttttctagctttgaaaagttgtggcctgcttgtccctctgttgactggtcatctggaccatcgtacttgctgtggctacttctaagacaatgtagagggttattaaaccttgaaactgcctttcctaagtagagaacaagactattcaacaacttctttgctgaagcactgaggagatttgtaatactcctaaaggaagggccaaactagagattttcaatcatagactttgtgacagcatttggggaactaaaagattcatgtgtttcagcctagtgggagagagtgggggagaggaagagagagagagagcatgtatacccgtatgttatcatagagcacgattctccagtggatggatacctggaatggatcattaagatgaagagagtaattcacatttactctagaacctttaacaagcactgaaaggaagaagcctgagatttgatccttgacaatttctggaaagcactggtcagtcacactgtcctggacagagtccaagttacccactaaagcttgaggtggatgttggcttcactcctgcagcacaatgctggccctagaaagcgagcattttcattcttcccatggcagctgattctttggtgccagttttcatgttttctccataggccttgtgcagaaaggttttctcattgcatccatactgtgagaataaactgcagactgaaagaaacatgcctgcagggtcaggaactgggccactgttcccagaacgggttgtgcctcagaaatctatttctcttttagatgttgaaccctgagagaactaagatgatatttcagaagagttggctgccttctctggaaacaaggaaaacccaataattccgaggaacattgggggttaaataccaagaataaaaattggttcttctttgacttcagcttaactgtattaagacagaaattaagccctctaaaaacaccacaaagagagatgattgtaatgatagaaatagaggtacagagctatgcaaaggaaacaggaagtgaaatattcctagtcccagggatctggtaatcgctcctggcttccagatgtcaaaggactgatcctttggtaagctcactagaaacttctagctctacaagagtttgggatattaatgttattcagtaagtcccaagtttttcagagaatagattactaacaatgaggaatttatattccttggttaatttaggagtctaagatgcagagttcagaaagaaattactcagacctaactttgagtgcttaagctgccaacagttagaagatgctatttatttgtgtctgtaagtttgtacatagtaatgccagccttgttgctgaattttttatttggggggagatgactttgaattttgtttgaaatgcttcagttgtcattttgtcattgcatttcaaatagctcatgacccttttcttgtggtcactttggcacaccatagtagcccacaaagtgggggcagggtattgacatttggattttttctttgatactagttcttttattcatttttatttgtgactgtagtgataactttacagatggagaaagagtgaatggatgaatgaataattggtttaatgcctagttatgcaacttgagtgcttttttttttttttgcaggataattttaagtgtatatattttaactgcactggtacattgaacatgtcagtgtcgatgccactggaccaacagagcattttgtggctatagggtgcctgataataatgtcttgatttttctttgggattcaactatatcgaaggtttttcccccagcagtatgggggcgtacaggtgatcgatcattaatgtcattgcaattgttattttttaaaataaatttataaaaataaccgaaaagtaatgtgacttttgaggaatctgcaactcctgggttctagtttgtgtttccagtgttgaaattttgatctcccccgacaagacttgtctgcatggacggtgtctctgtaaacagtatcaaacttgtaatgtctgagcctcttagctttatctccccttaatttcttcccttttggcccttccaccctgttgaggagattttttctgtcacctgcaggctgatcatacatttgatgctactactgaaagtgtttatcaaaatgtgatgaagtaattccatgaggaaaattagccgttatcacaaaaacagccttaagtattgtagaatttcaggtagtgaagatgtactatttacgttttgttagattttgttttggcagaagaccaaaacaaaagtacttttctgattgttaaaaatccacagcatgctcaccttgttactgttttaccttacggtcgctgggaatctaagcaacaaagactagaagcctccgatatgccattatcaacacacaagagacaaacagcccgaggaagcactcaatgatgagagcagtagacctgccctggcagatgagagaggagaaactctccacaatgaaggaaaagcactgacagtatttgatagctttagtcaaactgtgcttgagtttggcttagatttatgccagtggaacctgtccttaccaaattcagagatgacccaagattctactctgtggtatgagggaaagacctctcgatatttatctcacaccaacggctttatcgtaggagcgtcttcgcctcccccgtttccagtagaaaagacagctttgctcctttgaaagcgcagaccgccgcacctccagccccttctccccggggaagtaggccccgctaagaatgtgggaaggtggtggggcggcgactgaagtcgcttccgattggcgttgtcccaaggaagcctgcgcggattgatcggcggcaggcctccaatagagcctgctaggcggattggctgctacgcggctgggccctgtttccggtacctaggcgggcagccatggtgaccggcgagcggcatgcgacgccgcctctgtggcctgtggaggcccgcttggcggcgctgcttcccgacctactggtctttcggaagcctcggggatgggaacccgagctcgccacggcccagggcgtcctcctaggcgtccatgtgacgggtgagggcgacggccggcacttgcacttaagtctcctggcctgcgggagaggcggccgttgggtctaagcccctggaggcctcgacggttacaggcctagcctcccgcgagctaaggcacagtttaacttcgtgctgcggcttccttaggaaactttgagtatcttcgttttagcgtgggaggacatcttttgggatgaaccggctcagtccttgagctcaccccaaagatgatgaaattgaaactcagaggaaaggatttttacaggaccacgccccgggctttgaacccgtttttcccaaccccgagcattttctattaagcgttctgtttcaattattttattcgttcagttaattcgttcttggcgtcataagtatatgcccgccgttgttctggccgtagctatctagcagccactccgcgagtcgttcatttaacaaatacttactctgtgtcagggatatgaagatgggtaataccaggtgcctgtcctcactgtgtgagtggttctctagccagacatgaggagggatcctattgtttcccatagctaggcagcctaagagagtaggggaaagagctggctccagatgaaaagggcaccatctccagctcttggaagcagagagggtggtcctttggattcccagtggcagcagcaaccaacctggcccttagtagtttctaagttacaccatgttaatggataaaggaattactcagcttgaagggatctgtttcctttacactggcctgatgtgtggggagaaaggggccaaaaagtttaggatttggagttaacatcgtaatttctgctttgttggtcagggtttacagcattaatggacaggttcaccctgacctacaagtcggaacgtgacatggacaaactggcccatatcttcagttattacattagtgacatcgtggagcgtgagtgatcattgtagggtaacaaggtgtggtgctgggctcctgggggtttataaaagaagggggccagaagtactttaaaacaggtaccaaagggtcattcctttagcatcattcatctttggtttcttcaagttgccactgaaaagctagacctttgcctattatctgctaatctacccagtctcacattctattgactcattgttcaaagggggggcaggaggagctaatttcctttgcacatttgtattttatttcaaaataaagtattctcttctaacaataacgtatctcaagtgtgtattcagacaaaatttataaaacatctttttattattatattttgatcctgtgaggaaggaataggtgttttcttattttctgccatgtattaagcttttagatatttgccagatatccagtatctggaaaaaactcatttatgtagtacccatgttttgagtacctaccctgtgacatggactgtaataggtgcaggcagggcaagaacccactcttgaactttttagttaggcctacccaacagaaattactctgaccttataccttttagtacttacgtaacattctcatcctttactgacagtgccctgtatgcttccgtccatcattctgagattcaccagaataattactttgaggcatctccgttaagaatttgattatttgacttacctcttatccttaaggaacacatggaaggtcgtttgctttttcttataggtttggatgaaggggaagataaacattctatatcgtgtatgtactctaataccagcaacttctgggtactagaactacaggggaaagtaagacagagtaccctcgtggagtttccattttagtgggacagacaataaacacaataattgtagcttatatattctatcaaggaaataaacatagtatagtggtaaaaaaaaaacacaaaaaataattttagggtaggggagtatatgagacagggtggtcataggctcctctgaggaggtattatttaagctgacacttgaaggatgaggggaacagcttgtgaagaactaggggtaaagcatttcagacagaataccaagtgcaaaggtcctgagacaggagaaagctcggcatgctctaggagctaaaagaaggccagtgcaggccaaaacgtagctcgcagggtgaagagtggtttgaggcaaggttgggggatggtagctatgagaccaccacgctctgtagtccatagtgaagagttggaattatatatttctgtataaaggaaaactgtggaaaggtctagcaggggagtaatatgatctgattaacactttaaagctgattttggctaccttgtggagattgaatgctggtggaaagtgaatttaagaatagaagctggaagaggcaattgtcctggaaagatgttggagatttggtctagagcagtggttctcaacctcagctgtggttgcctgaggagctttttaattgttttttcttttttctttttttttttttgtaagagactggggtctcagtatgttgccaagtttgtcttgaactctagagcttaaaagattcttctgcctcaacctctcaaatagctaggactgcaggtaccataccaccttgtctaacaaaaaatcttaatgcctaagcttcaccccaggccatttaaatcggactttcttaaggttggcccaggaataagaccttttaaagtttcataggcaattccaatgtgcggtcaagactgaagattgttggtgtagaggtatggcaggggagctgtgtggggtagattaacctgaaatatattttgcaggttcaacagacaggagttgctaatacgttgaatttcagtgggaagtggtgagaaaaaggactcagttttttggctttcataaatgaattgatcgtgtcatttaccaagacaggaaagactgaacattgagaaagaaaatcaagagttctgttttgagtatgttgagtttgagatgccaataagtcattcaagtggagaatgactccattcaagtggagaatccagctatgattgagcctggagctcagagaagagatccctgttagagatgaaaatgtgagttgatggcataaagtgggacttaaagttaagaaccgattgagttcatgttgggagagcataaataaagagaaagagcctttggctgaggcttgaggaactccaggggaggattatgataagggagaaagaacctgaaaaagagactacaaacagccagtgaggtaggatattgtggtgttcctgaagccaaaggagaggtagtgtctctagaagaaagctgcagctagctgggttgaaaatgacagctgtcaagtacagtgaggtcagagaggtattgaatttagcaagattaatgctgttgatgaccttgataatttgaagtggtggaggtagaagtcagagtggagtaagctgagaaaaagaatgacagagaaaacatttaagaggaagagtaaatgggagatgaggaaaatatatatagccaacttttttgagatttgggggttttgtttgttgtgaatgtagcaggaaaaaaaatggagctaataggcagaagataaggtagaaccaagaatatgtgggttatttttgtgtgttttggttttgttttttaagctattgatgagaatatttcagtagagagattaggaacggtgtgaagttcttgagaaggtaaaaggggataagattcctatcacaaatggggtggctttgaagagagcaggaattcttccattttagaaacgatgtatgtaggtgcagatagatttggggagaaaatgaaaagaaggaagaaggagcctgagtcttggagtgagcaaatggacaagaatgatgtcaggataaactcagtaggccattcttttgaccatatatgattctgccctgatctggtttatatctgattttgactcattttcctctctcttccttacttgatttcagatgttctctgttttggaggggatatcctaaatatcacaggtatttttttagtttttctgaatacttaaaagactgagtgaggaggactatatttaggtggaattcagcatattggtttattcagcattgtttgattaataggtactggaccctggggatacaaagatgaggaagacatagtctgtgcctcaaaggatcccccagtctaatggaaaagctttgcccaaattaaactctcacatgctttgcatttttgtttagattgaaggacagcaaaataagtgccaataaagcgttcttgagaaaactaatgagaaatttggtcattaatagcagaagctaagcatgagatggggaggagttaagcatgtcctatctggagaactcaggatcactaacagctgtatgccccggagttggcctgtcttcttatttaaacataataaaaccagccatcaaattagatatgaacttgaacccacattttatgaatcttttgctagtacctctcctcctctgttagtatactggtggaaggaagattaccaaaaatatccttaggatcatttaaacttctacctagttacgtttttactgaatgattttgaggatctgaagcagtattttaacctagcataatgtatacagccaagaaaccttgcctgataacttacttgatatccacactgggtcaagttgatcttctgcattactgggactttgccctggaccaagtaagtctagatatttggtccccatcagcctatcctgtgtgtctgcagggaacatgctcctggcactctggagagtagaacaaaatcaactgagtgacatcattaccttggtggcaaaatgcagtctggagatacaggagaaatttgggatctatcataccagggaaggccaggacctgcagttaaagataggtagtacctcctaaaagagtgatccagttgggcaagggggaacccactataaaaacctcaaaagataaatgataaactgggaaaaaatgtttgcaattcatatagacaaagggtgaattgctctactagggaaagagcacttagaaatcaagaaaacaatagtactcttaagagaaaaattggacaaaggacatgagtaaattgtatatagacaaggaaatgcatgtcttttaacacgtaaaaagatgatcaacattcataataagaaaaatgccaattggaagtacactgactacctgtcttacctatagataggcaaaacttcagatgctggacaatgtactctttggtgagtctgaggaatgagctttttcttactgtgagtgaacaacggtataaggtgatttggcaatctttatttatttttattgtctattgtattttttatgtcaacaaaaactaaaccatataaaaatatatattaaaaagtcttgttttcacttatataccatctatactatttactcttacaagtgcatttattccttaacctagcaatccttctggacatctataggtatacgttcacacatctgaaatgttgcatgtgcaaggttattgattgtaatatggtttgtaattttaaaacattgaaaactatttataggagactggttaagtaaataatatgtatactcaataagattacctgcaacttaaaaaaaataagatgtcttgatatggcagtatctccaagatacagttaagtgaaaaaaagtaagatacaaaacagcatgtttagtatgctaccatttgtgtaaggaggaaaataagaatttttcttatttgtttatatctttttttttttttgagatggagtcttgctctgtcacccaggctggagtgcagtggcgccatctcagctcactgcaagctccacctcccgggatcacaccattctcctgcctcagcctcctactgagtagctgggactacaggagcctgccaccacgcctggctaatttttttgtatttttagtagagacagggtttcaccgtgttagccaggatgttctcgatctcctgacctcgtgttccgcccgcctcggcctcccaaagtgctggaattacagacttgagccaccgcacctggcctatttgtttatatcttgtataaagaaacactggaaaaaatatataagaaactaataaaattactaatatcaggaaaatagtaaagatggtcatgtaggtagaagcaagattttaaaatacatattctttcatatagtttagtttttgaactatgttattgcttgacagaatcaaaaatataatacaatataataaaaattaaaaagctacatacaggggccaaagtttcaccaatggcagagtcaggattggaggcgaagctcaatatacaaagctccttcacaagggttcagaaaactcctcaagggcaaaagttggctccagctattcttttatgttttgaggagcagtggtaaaggattatattctgtcttatatggcatctcttttgtcctgccgtcttttttgtttcttttggtttttgttgtattaaggataattgatactatacattggcatatttatacacttttgaaaccatcaccacaataaagatagtgaacatacttatcactcaaaaagtctcctcgtgcccctttgtacattcttccactactctccttcaccatctccagacagacaaaatgtccatctccaggtgtattatataagagaaggaaatctgggggaagaattttttttttttttttttgagatggagtctcactctgttgcccaggctggcatgcagtggcacggtcttggctcactgcaacctccgcctccagggttcaagcaattcttctgcctaagcctcctgagtagctgggattataggtgtgcaccaccacgcctggctaatttttttttttttttttgtatttttagtagagacagggtttcaccatgttggtcaggctagtctcgagttcccaacctcaggtcatctgcccgtctcagcctcccaaagtgctgggattacaggcgtgagccaccgtgcctggccgtaaggtattatttttaaaggttagctcacctaagacttccgcagctgagggcagtaacaagataggcatgatgcacagagccatgtggggattccagacccctcctgttgcatagtttcccagttgaatttgactcttctccatttatctcatttttttctggataggtctacctgcaagtcggatttcccaggttattgttggagatgagcggcagcaatacctcttggtgattgggcaggttgtagtgatgtccagttagctcagcgtttggctcaggcgaatgaaattgtcctatcctggaactgctggatgctttgcaagcagtatatgtttgaagtggcaatcatgagggaggatgaagctgtgaaggtaggaggctagcttcctgtactgccattctgaaaaggccttcctagtacacagcgcaatgctctggtagtgttcacatattgcctggccaaaccaatgaccattggaactcaatttaggagggaggctgggaatattctcctatgaagatagatgaggtagaacagtgaggctgaggagataaaaggcaaacaagggcaatagaatcctcagcctttcttgtgtgggggcacagaattaaacagtttcctttctgtagttaagagatatgtggatc

SEQ ID NO: 58518 - DNA, 418 bp, Homo Sapiens
ccgggcaagatggcagcggcgctgcgtgcgttgttgagtgttcgggacgccggcctgcagcgaccaaggtcttcctcaccgcgcactactggctgcgtaatcgcgtcaccgaccgctactttcggatccaggaggtgctgaagccgccagagcacttccggggaaggaaaaatcgctgctacaggttggcggtcagaaccgtgattcgagcctttgtgaaatgcaccaaagcccgatacctgaagaaaaagaacatgaggaccctctggattaatcgaattacagctgctagccaggaacatggactgaagtatccagcgctcattgggaatttagttaagtgccaggtggagctcaacaggaaagtcctagcggatctggccatctacgagccaaagactttcaaatctttggctgc

SEQ ID NO: 58519 - DNA, 4542 bp, Homo Sapiens; identical to SEQ ID NO: 24399

SEQ ID NO: 58520 - DNA, 802 bp, Homo Sapiens
caatgcattttatatatttttagaaaccaaataaatgcagaaaactatttagtatactaattatattaaaccagcagaaatataaaggcaataaggtatatacatatatatggggggaggggaaagattaaaaaatagatttacagccagacatggtgatagccctaaatgtatttctcaatatgtttttctttattgaccctaggaggatttgagttgctgcagctttaaacagaaaattgccatgttcactaattgtgagcacataaatatgcttttagtactgctttgcttatgtacaaataaatctgtaatatgtattatatgtaattatccttttctttgactttcattttaaatgtatattttctgatcattatgagctgtaaaacaaagaatcaatattggatattctcccaaataataaattttcaggattcattgggcgaaacaacaacaaacacaaaaacacatacacaacataataattcaaaaaaacaactcgtttttgcgcgcgcacactgcggcccctcgaaaaaaccgtctcttcgaaaacccactctgctgttgcgggcgcgcgggaccccccgatgtggataaggggaaccacggtgcaccaaacgagggcgtgtctccccaatgggaaaaaccgcggtgggcacgaaaagcaagtggcggtcggatttccgtccacccaagttataaaaaatcggccgggcgtaacacccgtgagctgtttcgtgacacaaagcccccaaaaggggctcactcagagacggatcaaaacgggggaaccacacag

SEQ ID NO: 58521 - DNA, 2678 bp, Homo Sapiens
cggccggccaatacataggaacacttgggtccctgcagtcagggtgtggaaatggcagatgagttcagccctaaggtgcatttttcttactaggaggagatggagtgtattttatgggatataagcattagctacatttcctgtcctgttcacatcctttgcccatgtgtctatgaggttattgatcttcttactgatttattgtagctctttacttaggaggttaattagccttttgcctgtggagagttttttggtttgccatttgtccttttttaattttttttgttttttggccatttgtcttttgactccgatgtggtttttgctgatttcctttgatgtattctagtttatctgacttttctttggcgacttatggactttctctcaccactaaaagccctcactgctctctcagtcttcttgatttaacctcctccaggcttccgccttctccaggccctgattctcagttggagttgctggtgcctcctccttcacccagcgtctgacgctggagtgctcacagtgtggctgggacccacttctctcctctgtagatacccacccctgtgttgatcacttgcaggcccgggttctgtgtgccatgtgtatgccctagagcccttgctcacgtttccccacagccttcatgaagtctgtgttcctcagatgccccacagacatcacaagcaaggcacatccaaaccccagaccactatccaggagcctgcaccctctttctgttggctccacctccagcctccgagacccacccacttccctgcatttgctgagaccatcattttccacctagacaatgcccccacgcttgccctacagcccttccaaaaacgattttttccaacttaaatcagactagaaagctttttcacatagcccagtcttcctccttgtgctgggttctgtctcattatcacctcatcagggaagtctgtacagatagaatccctacccctgcatttgtcgcctccgtctgcctctttggtcagtttcaggtccctgtagttcacactgtgtccccagggatgaagtgggtcccggcacggtgggcattctgtcatgaatgaatggtccccttgtgtatgcagggttcgcgctgcagctaggcagcatctccgcaggtccaggtagtgtaagccctcacctccacgtcccctgggacctcggcatggctggcctttctggccagatccaatcaccctcccgcgaaggtggctttgcgcatcgcgttctgctccccagcgatctgaggagtgaacaggaccccacggacgaggatccctgccggggtgtgggccctgctctgatcaccacccgctggcgctcccccaggggccggagccggggccgccccagcactgggggcggggtggttaggggcggccgttgcgatgtatgtggcaaggtgttcagccaacgcagcaacctgctgaggcaccagaagatccacacgggtgagcgaccattcgtgtgcagcgagtgcggccgcagcttcagccgcagctcgcacctgctgcgccaccagcttacgcacaccgaggagcggccgttcgtgtgcggcgactgtggccagggcttcgtgcgcagcgcgcgcctggaagagcatcggagagtgcacacgggcgaacagcctttccgttgcgctgagtgcggccagagcttccggcagcgctccaatctgctgcagcaccagcgcatccacggcgatcccccgggccctggcgctaagcccccggcccctcctggtgcgcccgagcctcccggcccctttccgtgcagcgagtgccgcgagagcttcgcgcggcgcgccgtgctgctggagcaccaggcggtacacacgggcgacaagtcctttggctgcgtcgagtgcggcgagcgcttcggccgccgctcagtgctgctgcagcaccggcgcgtgcacagtggcgagcggcccttcgcctgtgccgagtgcggccagagcttccggcagcgctccaacctgacgcagcaccggcgcatccacaccggggagcggcccttcgcctgcgccgagtgtggcaaggccttccgccagcggcctacgctcacgcagcatctccgcgtacacacgggcgagaaaccctttgcctgccccgagtgtggccagcgcttcagccagcgcctcaagctcacgcgtcatcagaggacacacaccggcgaaaagccctaccactgcggtgagtgcggcctgggcttcacgcaggtctcgcggctcaccgagcaccagcgcatccacacgggcgaacggcccttcgcctgccccgagtgcggccagagctttcggcagcacgccaacctcacccagcaccggcgcatccacacgggtgaacggccctacgcatgccctgagtgtggcaaggccttccgccagcggcccacgctcacgcagcatctgcgcacccaccgacgagagaagcccttcgcctgccaggactgtggccgccgcttccaccagagcaccaagctcattcagcaccagcgcgtccacagcgccgagtagctccagccgggacgcactgtgtccgccatggtcctcccctggttattgtgaggctggcgattacataagtataagcaggtcgcccagggcttggctactgtaggtgtccaataaacagtagatggaaacc

SEQ ID NO: 58522 - DNA, 727 bp, Homo Sapiens
taaaatattaccttttattttctcaggcacacaagtgatttggataccaattatcaagacattttactgatttccctttagaatgatctattttaaatcttcagccaccttagaaaaagtttgcagcaatcactttgcaattcataagtatcaggttagaatttagttgtggaataagttaacagtttatgttcaatatgtgaggttatttgaactcctgagttttaaatatcctgtggaacagtgattcctctcccttctaatggcttttcagattaaagcaatgactttaaaaagattacatcctaaatacttgattacaacagaaatcgaccaatctaaaaatcagatagtgttatactgaacatcattctgatataatgagtagcctctggctgaaacaaaattccaccaccaaggccatcaaccaggttagtactgtttttcctggggtctatgtaaactctccttttctctgcaaatgctgcttggctgtgaacagcatggatttacctgcaccaatgtggcacacacctagcaactttctcaagcattctaaagatatccccagagctacaatattgacatatgcacagcactttctctagacagtccaatcagcgtgcacatcacacacacagaatgctgggatatgctatactgcacacttagtacacaggtggaatagagtacaatgactaaagctcacagaaaatgttttagtctt

SEQ ID NO: 58523 - DNA, 548 bp, Homo Sapiens
ttaagaaaaaaatggatgatttattatataaaattaagattggcagaatacagaaaattatttcttttacctttacatatttattgttaagtaccaagcaaagtgtaacaattagaagaactcattacaaactaccaaaatgtattcatttggtgaaattattcaagtcacaaatgcttagtaaataaatgtacttcaaaatacgtgaagtgtaaaacaagtatgaaaacagtgatcttaaacaatgattcctttcacaaaaactaaccaacaaacaagaagcacaagaaaaaggttgtcaggttagacagaaaaaaataaatcaaatgtattgttggttgggattgttaaactaaaatcattaaacgaaaaccagcaactagattcaaaagagagaaaaaaaaccgaaatgagtaattaggattcaaaaagaataagggtattacaatactatatctgttttcctactaatagcaagaaatgaggatttagatgccaattatgtcctgtagacccaggtgctctcaaagtatttgcactggtcttct

SEQ ID NO: 58524 - DNA, 412 bp, Homo Sapiens
ttttctctttttttctctcttactttttccagctggcaatccttttattcctccaagttgaaagcacttgtaactttacataccgataaactaaattatatagacacagaaattccaaattaaataccaacagtacaaggatcaaaagcattagctaaaatttttttaatggtaaatactacctttatttaaaaaagttatacatgctagaaaaaagcataaatgatatatgtaaacaattgtttactcaatactttttttccttgaaaaaggtgcaaatgatctttaaatgtaaacacaaagttgccaaacatttttgtagttagggaaagggagaaggaggttattccttttaaatgcagttagtcttattcaaagattcttcttgcaaaatatattgaaaaaaatttgt

SEQ ID NO: 58525 - DNA, 4362 bp, Homo Sapiens
gtggttagtagcgataaatgctctgaaggaaaaaacatacagtactgtgagaatgtagtattttgaaatgtttcatttgcaaaattgtacttgatactcagaatagtgtttttttttcctaaaatacttaatatgctgaacaggtcaatgtatcatctgcctagtatgcataaacaataacagtaaatgtttagtaatttgagcacagttgggtatgttcatgtattttttattccttactctgtttgcattgccagtgtttgattttgctatttcaaagaaatggcattttgttgagtttgaaaatttgaaggtgcattggatcctgctaatttgttggattctgctaaattgtagcagtacagctctcaggttttgtagttaagagcataacttcactaaataaaaatatttttaatacaataatatggaatcagagtaactctcctttttcctgctcaaactttgatttgctgaagctgcttcccgaaaatcatgtgtgtcgactctctggtcagaatttgctccggactctcttatggcagaatcagaaatattaaaagtttgtcagatatccagattgtacaggttgcttgtggttactatcattcacttgcactttctaaagcaagtgaagtcttctgttggggacagaataaatatggccaattgggtttaggtactgactgtaaaaagcaaacttcaccgcagctgcttaagtctttgcttggaatccctttcatgcaagttgcagcaggaggagcccatagttttgtactcaccctttctggagctatctttggatggggacgcaacaagtttggtcagctaggtcttaatgatgaaaatgataggtatgttcctaatttactaaagtcactaagatctcagaaaatagtttatatttgttgtggagaagatcatactgctgctctaaccaaggaaggtggagtgtttacttttggagctggagggtatggtcagttgggccataattctaccagtcatgaaataaacccaaggaaagtttttgaacttatgggaagcattgtcactgagattgcttgtggacggcagcacacttctgcttttgttccttcatcaggacgaatttactcttttgggcttggtggtaatgggcagctgggaaccggttcaacaagcaacaggaaaagtccctttactgtaaaaggaaattggtacccctataatgggcagtgtctaccagatattgattctgaagaatatttctgtgtaaaaagaattttctcagggggagatcaaagcttttcacattactctagtccccagaactgtgggccaccagatgacttcagatgtcccaatccgacaaagcagatctggacagtgaatgaagctctaattcagaaatggctgagctatccttctggaaggtttcctgtggagatagccaatgagatagatggaacgttttcttcctctggttgcctaaatggaagttttttagctgttagcaatgatgatcactatagaacaggtaccagattttcaggggttgatatgaatgctgctaggcttttattccacaaacttatacaacctgatcatccgcagatatctcagcaggtggcagctagtttggaaaagaatcttattcctaaactgactagctccttacctgatgttgaagcattgaggttttatcttactctaccagaatgtcccctgatgagtgattccaacaatttcacaacaatagcaattccctttggtacagctcttgtgaacctagaaaaggcaccactgaaagtacttgaaaactggtggtcagtacttgaacctccactattcctcaagatagtagaactttttaaggaagttgtggtacatcttttgaaactctacaagatcggtattcccccttctgaaagaagaattttcaacagttttcttcatactgcattaaaggttttagaaatactacatagggtaaatgagaaaatgggacagattatacagtatgataaattttatatacatgaagtacaagaattgatagacataagaaatgattatatcaactgggtccaacagcaggcctatggaatggatgtcaaccatggattaactgagttggcagatatccctgttacaatctgtacatatccatttgtatttgatgcccaagcaaaaactactctgttacagaccgatgcagtcttacagatgcagatggctattgatcaggcccacaggcagaatgtctcctctctttttctcccagtgattgaatctgtgaatccctgcttaattctagtggtgcgtagagaaaatattgtaggagatgcaatggaagtccttaggaaaacaaagaacatagattacaagaagccactcaaggttatatttgttggagaagatgctgtggatgcaggaggggtgcgcaaagaatttttcttgctcatcatgagggaattattggatcctaaatacggcatgtttaggtattatgaagattccaggctcatttggttttctgataagacatttgaagacagtgatttgttccatttgattggtgttatctgtggcttagcaatttataattgtaccattgtggacctccattttcctttggctttatataagaaactactgaaaaagaagccatccttggatgatttgaaagaactaatgcctgatgttgggagaagcatgcaacagttactggattatccagaagatgacatagaggaaacattttgtcttaattttacgatcacagttgaaaactttggtgcaacagaagtgaaagagctggttctaaatggtgcagacacagctgttaacaaacaaaatcggcaagagtttgtcgatgcttatgtggattacatattcaataaatcagtggcttccttatttgatgcttttcatgcgggctttcataaggtctgtggaggaaaagtccttctgctctttcagcctaatgaactacaagcaatggtcattggaaatacaaattatgattggaaggaactggaaaagaatacagaatacaaaggggaatattgggcagaacatcctacgataaaaattttttgggaagtatttcacgaattaccattggaaaagaagaaacagtttctgttatttttgacaggtagtgatcgcattcctattcttggtatgaagagtctgaaactagtcatccagtccacaggaggtggtgaggagtatctcccagtttcccatacttgttttaatcttctggatcttccaaaatatacagaaaaagaaactctacgctctaaactgatccaagctattgatcacaatgaaggcttcagtttaatataactttggagttataactattcagtttagtgcaaaagcattaaactatttgtgtttttcttgtggtgatgaattcagcaaggtgacagaggtactattataattcttacttgcagaatgttcaatctacgagtgttcatggaagccaaaaaatattaaaggaaaatgaacaaactgttaatattattgtacagaaccatggattttttttgaccatcttctaataaacatagcaagtattatgaatacattaaagttttactaacatgaattttaagagtttgcatatttcagaaatgatctggtgtgagtgcatggaaatattgcttaatttttcttcaatcattgagtgaaaaacctttaactttggcctgcaatagtcatttgattattttttcattttgtaaataatgttaagttttgtaataaaatagttatgttctgataccagtacagtttctatggttgtaattgaacttgaacagacttttaaaggttaaaaattatgatttaaatcttactctgagactctataaaaagaaaaaaaaggtagcatggtggaaacactatcttttcttttttgctagaataagtgtctttgtgcaaacctaaatcacagatagggaatatactacataacctgcagttcttttctttgtgaatcctgacacactgatagatgggggattgtcgatcagagaacttattaatatttagtactggaagaactctgtctccacagttgccagtaataaaaagaaacattggctactatgagcaccaatcactgggttatagctttcaaaattattgatgctgcagtgctttagagctatttccttgaatttaagaaacaaatcttaacagttttatggtgctgatgcttagttgtctcatgccattaaattgtaaaagtgagttgatgcaatacatgtgactttctgctataatgcaaatatttattttttaaatttattttaaaatgccgtgaaaactgtttaataaagatttattgttttaatattt

SEQ ID NO: 58526 - DNA, 4608 bp, Homo Sapiens
gaagaactttccagtttaggtccccgtcactgtctccacgccgtgatggcagcgctgccgaggacataggaaccacgactggaaagataatttatcgtgttaggagaagaacgatgatacctacttaacacctcagcatctgcgtcgtgtctctttgtgcttttgtttgtggaaggagacccaaatgcctttactttattctctggggagggccagcggctcgcatccccctcatctccagctgcagctcggatggtggattttcagtgccaacagacacatctgccgtgaactcgcagatgccagggagccctgtagtgacacgttctctgacagcaccttgccgcctgcccacgaccttgaccgtgaggagctgctatccgcaaccagcgccgacaccatgccccctcttcctggtgacaccctcaacaaccaggatttgctcgatctcagcccagcaggccaggcagacacaccccgctgtgccttaggaaggtgtgagaccggcttcccccatccccacagcaaaacacggcctgtcccaagccagtgaggagctaaagacacccaggtccccaaatgatcttactccatgccccacccgctcacaccgtcctttcccgtcacccttgctatcccctggagcactgccctccagagctgcccttcccaggaaggaatttggttggattctgtcactgtggagaccaagattttttaaaattcccaattacaaaagcagcatcacacttgcttctgagaacagcagggtgatgtctgttcccaagctggtggcgggagccttagcctgtgtggggccacccggggaagaggaggagaggagggtgaggaggcaggctcgccgttccaagggacagcataggctcgtggtggggcgtgttgcatctggtgtctgggacagtccccgtcaccccatgtgtgcggcctctgcactcccaagctccatggctgggctgggctgggctgggctgggctgggccgggcgtgcggagcctgtggagccagcagctgcagaggcctaggagggagttcctgggggaagcgcacagtgtccagtgcccatctcttgcttgtgtgtgagattagcccttgctggggcgtcaagaggaagagccttagacctgggcgggccttcaggggcatctagacccctgcacagcccaggcctggtgtctgcatttccacagcacccctgtggggactcctgccggggctggccgctgtctcaggagagacccaatggttagaaagcccctttttacacagctgacagcttctcccaaggcttccgtccacggggacaggcttaacccctgggcgccttttctgcagcatggcggccttctgagtcacctaagctgagcctgggtcattctctgtggcggtcagaaggccgatggccccaacacagtggcttgtgaaagggagagaggaggctctgcatgtccacctgctctatgggaggaggacacaggtgtccccagcccagcctgttctctcccagtcactcagggatggggccacccaaagtgcaggacccgccccaccctgcggttcgaagcctggcccctgtctccacttagcttctgtttctgcagtgggtggaagcgagtcagcggggggcctggcttgtgtacgtgttttccttatttggtctgtgggttgccaagtccatttttttttccactgaactggctggtaacttgatggactgtgtaactgacacaggccctctttagacccctgccttcaccccacccgcccgggtccactccctggggcgctgtcccaagccatccctgcttgccagctcaaagcttcaggtcctaggagccagtccacctcgaaagccctgagaaagtgagacacctgcacattcgctgggggagaccctccgttctcttgtggcagctgctcccacttgttaaaccaagctgtttctgcgggacgtgctcactcttgggaaccagtggcctagagctttgggttacaggcatggagagggctttcctgcctcaggcttggaggccaatgttccatacataaaccgccatgtcctctggtgcagctgggctgctcttttaaaagccagcatccatcttgaagctcgctgggtaaatggcaatgcattctcaagccagtgtcttcagctgatgcccagtgtccagtgctggtcaccagtcccctttgctgggtacagcctgcctggctgttctgtggtcctggaacgctgcagtgtggttttgttccatggagacagtaccaagcggagaggcctccttgcccacggccccagggcctgggggccaggggttctggccctgcggggacttaggcaggaggggaagagaagcccatggagccatgggaggggtgagctgtgggcggggcctagtcatgggaggggtgagctgtgggcggggcgagctgtgggtggggcctagccatgggagaggtgagctgtgaatggggctagctatgggtggggtgagctgtggacagggcctagccatgggaaaggtgagctgtgggcggggcctagtcacgggagaggtgagctgtgggcggggcctagtcatgggaggggtgagctgtggatggggcctagccatgggaggggtgagctgtgagtggggctgagccatgggagcagcaagctggtggagtgggctgggcggagctgtgggggctgctggcagggcctaggaaagtagacaactcccgggggagacgaagtagagagtgagtccccaagaaagggactcctgccccagcgtcaagtgccaaagcaggccccatctaccacttcagggtcgacgttggtggcaggtgttgttcacggtgtactgattgtcactgcaacacctccacatcaccttgaacttcaagaacagcagcaaagctgtatctgctatcagaggctgttaggtagtccagctttaaaataacacactctttctctatcccatgccctttaaacaagcagccacaggagatgtcagtctccagggcctggccccactgtgttgacagcagtcacgtctgttgagctgacactgctgaggctgaagctggccccgtgcaggtggctggtgagccacaggtgcagtacccggaggtgtgctctcccctagaggcctgtccccaactcctcccctagaggcctattcccgctgctcacagacctcagcagaggcaccagctggagggctccagggacatccttggagatacaggaggctttcctggcacagggcacagctcttaggaggcctttgtaggacgctgtctccccagcgtgtcctgctcatccaggatggggagaaagaggaggaggccccaggctcagaagccagggacagactgccgacgattaccaaactgaatccaggcagtgccatgaccctgggtgtcccttggttcacatcacccaccagacagctgcggagagagtgcagggaggggctgggaccaaacaggccagaaaccagcagaaaagaggcagaagtgaggtgggtgtgcctggggcacgaagccagcgccggggggatttcagtggagccttacagccaggctccgtgcggactgtgatgccagagaggcgtgcagcctctgggcaagtcgggagagggcttgggtggtccccacaaggcagaagaggtggaagggccagagaagaccaccaagaccaccgttcccgcaggcctggggtgagtgacctgactgagactagcgggcagagccaagcagggctaaactccaacccagggcccggtgttggacaaagtagctttttctttgctcgtttgtctgtgtattaagaagagactaaaatagccaaacgacgctggtcgcatgcgctggctgtggtctgtctgctgaatgtctatttttgtctcctgacgagacgtgaggaccatgcccttgatccctccgatggaccagaaacccccttccttgcaaaaaaaaaggcaattgaattaggaaaagatagcccaacctagctcagatccaccaagataagcacagcaaaagcttggctgcatttttgaggaataaaaacctgcagaaagcaccgataaccttcaagatctgaatgagattctattataacccgtctaaacgattgcaaaattcctcctttggttttggaagcagcgtttgctctcccgtggctcggattctctgaggaccagggagttgacacacaaaccccgccatgggtccgagccagctatttctcaaggctcccacctcgccaagctcccaagggcctgctggcagtgcctacgctgtgccaactaccctgtctggtacagaccacggctgggtaagcacccttaaaagcaacagaaatgacgtctggaagctgaaatgtgaaactgtcaagatggcttaggagaggaaggagtggacccgctggtctttggcattttgtatttagaattattctaactttatacataatgtataggccgatcttttggaagggataaggttttcattcttgtgcaactcattattctcattattggccttttaaataaaaagttgttttgcagtgtgaaaaaaaaaaaaaaaaaaaaa

SEQ ID NO: 58527 - DNA, 1597 bp, Homo Sapiens
ggctgagcactcaggcaatcacactctcagaaactgcggcggctctggactgcagcctccaaggctccatgccagacaaagctatgcgtagtcacacttgctacaatagcctggatggtttcttttgtctccaattattcacacacagcaaatattttgccagatatcgaaaatgaagatttcatcaaagactgcgttcgaatccataacaagttccgatcagaggtgaaaccaacagccagtgatatgctatacatgacttgggacccagcactagcccaaattgcaaaagcatgggccagcaattgccagttttcacataatacacggctgaagccaccccacaagctgcacccaaacttcacttcactgggagagaacatctggactgggtctgtgcccattttttctgtgtcttccgccatcacaaactggtatgacgaaatccaggactataacttcaagactcggatatgcaaaaaagtctgtggccactacactcaggttgtttgggcagatagttacaaagttggctgcgcagttcaattttgccctaaagtttctggctttgacgctctttccaatggagcacattttatatgcaactacggaccaggagggaattacccaacttggccatataagagaggagccacctgcagtgcctgccccaataatgacaagtgtttggacaatctctgtgttaacgacagcgagaccaagtcaaacgttactactatgttgtatatcaggctggcccatatatccacgtaacagatacacttctctctttctcattgttaattcagtaattctaatactgtctgttataattaccattttggtacagcacaagtaccctaatttagttcttttggactaatacaattcaggaaagaaaaaacccaaaaaccaacctcattcacatatggctttttttttaacccaataacaattaggtgtaccttcctatttaaacatttcataaaaaaatatatgttatagcaatactcttactcaaaagaagaaatttcctaactctatcagataaactcatctttagtataaataagcattatttgcaggttgcctacaggtggacttttagtaagtaacctaacccatgtttcagcttctaaatctcgaaaatgagcaaggtacaggtacagtagcacatttttaggtgattcttagtaactccagtagccttcattagttaaaaacattattattttttgcatgctgcttcgactctaaatatcttgttttccctgtctttttggtttactacttccccagattcagaacagaggagtaactaggggatctgattttagaggcctaattttctgttcatggactgttaaaagtaaaaccaaactttcaaaagggataaacctaaatatttacttgttatcattagagagggaacatcaaatgctggcactatatacatacgatcagcctgattatgatatcacaatggtcgtaatgtatacaaagacttatataccactttctcgtataaatttttcaaaaaatacaataataatataatttataaagaacactcttctatgaacaaccaccaccacca

SEQ ID NO: 58528 - DNA, 490 bp, Homo Sapiens
ttttttttaccaataaagtgatttgtatataactggcggcagggggaggggggcggttggagactgaattgcccattcaaatcattagactttttaaaaaaacatttcctcgatggaaatttccagttccacaaaagaaagtaatcaaacagatgttcctccttaagtcttaaaccacgacattcagatgatctatgtgcaaattaataaggttatgacataattcaattatgtgacaaagccgagggagagttgacaaagaaccagactggcatcattgacttctcaatgaagtggagctcggtaaaaaatctagatgaatcacaggttgtctgaccagaagatccctgacaatgggctgtttactttagagaaaggagctgaaccctgaaaactgaatgtgcgaaattctaattatcaaaaaacccacggcgcatcaggtagacatgatcatctgcatttcttttccacgctgcaaatcaccgcgatc

SEQ ID NO: 58529 - DNA, 5222 bp, Homo Sapiens
cttttccaagacttttctgggttagtttgctttccagcccactgatttccttcttattggacaggtcactcttttgcatcccaagcctggcttaggcaagtccctgaggttagtaaacaccttcagtgcccctcagccgagtcccttttgaccatggaataccatcagcctgaggatccagcccctggtaaggccgggactgcagaagcagtcatccctgaaaaccatgaggttctggcaggcccagatgagcaccctcaggacacagatgcaagagatgctgatggggaggctagagaacgggagccagcagaccaagctttgctgcctagccagtgtggggacaaccttgagtcccctctgcctgaagctagctcagctccaccggggccaacccttgggacactgcctgaagtagagacaataagggcatgctccatgccccaggagcttcctcagtcccccaggacccgacagcctgagccagatttctactgtgtcaagtggatcccttggaaaggagaacagacacccatcatcacccagagcactaacggcccttgccctctccttgccatcatgaacatcctctttcttcagtggaaggtgaagctccccccgcagaaggaagtgatcacatcggatgagctcatggcccatcttggaaactgcctcctgtccatcaagccccaggagaagtcagagggacttcagcttaattttcagcagaatgtggatgatgcaatgacagtgctgcctaaactggccacaggtctggatgtcaatgtgcgattcacaggcgtctctgattttgagtatacacccgagtgcagtgtctttgacctgctaggcatacctctgtaccatggctggcttgttgatccacagagtcctgaggctgtgcgtgcagttgggaaactgagttacaaccagctggtggagaggatcatcacctgcaaacactccagtgacaccaacctcgtgacagaaggcctgattgcagagcagttcctggagaccaccgcggcccagctgacctaccacggactgtgtgagctgacagcagctgctaaggagggtgaacttagcgtctttttccgaaacaaccactttagcaccatgactaagcataagagtcacttatacctactggtcactgaccagggctttctacaggaggagcaagtcgtatgggagagcctgcacaatgtggatggagacagctgcttttgtgactctgactttcacctgagtcattccctgggcaaggggcctggagcagaaggtgggagtggctccccagaaaagcagctgcaggtagaccaggactacctgattgctctgtccctgcagcagcaacagccacgaggcccgctggggcttaccgacttggagctggcccagcagcttcagcaagaggagtatcaacagcagcaggcagcgcagccagtgcggatgcggacgcgggtcctgtcactgcaggggagaggagccacatctggacgcccagccggggagcgtcggcagaggccgaagcacgagtcagactgcattctgctgtagctctgccccagtgccaggctggcctgccccttcttccagaggctatggctagttggcttgctcccccgcctccacccctgagatgtgctggataacttatttatggactgttggggatgagagcaggcaacaaatgccaaggtcagacttggtaatgtccttgacctcacgtgctgctgccttctctgcctcccacccagggcaacactaggattggtgggtttctggttctcaactcccggtccctgaatagtcacacgtatgtacagactgaggctctggggtgaggtccctatccagaatgcatctcttctgcttcccatccctgctgcctggatgctcctgatcacctaggcaggcctgtctccagttgtttcagagcttaatttgggtttctatctcttatttgtaatgccttcctggggtttggaaataaaacttctggccgggcacggtggctcactcctgtaatctcagcaatttgagaggccaaggtgggcggatcacctgaggttaggagttcgagaccagcctgcccaaaaaggtgaaaccccgtctctactaaaaatacaagaaattagctgggactacaggcatgcgccactgcgcccagctagtttttgtatttttagtagagacggtttcgccactttggtcaggctagtcttgaattcctgacctcaagtaatccgcctgccttggcctcccgaagtgctggaattacaggcgtgagccactgcgcccagctacctgtcatttctaatatagcctgcagggggaaccaaagcctgactttttgtttttgtttctgtttttgtttttgttttctatgggaaatagtgctctcctgggaggtgggtttccaaatctctgcttggacacatgaatttgagggttgtgctctccactaacccaagaattcccatgctggggagggtagcttggccctccgcttgcttcccagttcatacagatggtcctttgctccctctatttctcaccttgttctaatgcctgtttctcaattattttgcctgaagtttcctggagaatgagggtgaggggagacctggagtgggagacctgggtgtggattactgtagcactaaggcaaaacaggattcctgcggaatagccaagtgcacatcaaaggcacctccaactccagtgcctcttcccggtccatgtcctgctccacccaaccttcaatcagggaacacaaacaacagcgaagtttgccaaaagaattcgagtatcagtgagatgttctggccagggtacaggagggatgagtgaggcagaaactatcaaagaaaactcatttccccacacccaagaaggagctggatgacccaggtacagatataattttgagatgggaaaattaagggattttaaagaaacagttccagcctcaacaagaagctagagaatgtggtgctcagtgaggggttatcctacttggaggcccagctggtctcccaggttcagccaaacacggaaatctcagatcctcggatgtcatgtggggtggggcagggaagtctcacatgtcttcagccctgcacaaggccaggagggctgactggcaatcccctttcactgcatcctgcagacaagggaattcagtgttagaaagatccaccaccactatggcccaagtgctctctcccctcctttgggctggtccatcacagttcatctgggagggaagggtcctcccgggagctcagagtcctgcactacattaaccaaagactcctgggttttcttttttgggatggagtcttgccctgtcacccaggtgggagtgcagtggcgcgatcttggctcactgcaacctctgccttctgggttcaagcgactctcctgcctcagcctcctgagtagctgggattgcaggtgcacgccaccatgcctggctaatttttgtatttttagtagagacggggtttcaccatgttggtcagggtggtcttgaactcctgacctcgtgatccgcccacctcagcctctcaaagtgctgggattgcaggcgtgagccactgtgcctggctaactactgggttttctatggggcaagaatatgctcagctgtgtgcagggagtgagggtggaggtgaggagtgaaggcctgaggctccaggctaagaagtagccaagtttcacctggagagaagagtagagggacttcccaaatttcttcctgaactcagctctgatactcagaaggtcagtctcacatcgagagataaggatgcgaatcaggacttggtaattgggctcagtttcctagtaggggaagaaagagatggggggtagttagtgagagtctcactgagagtaggggttgaatggcttggagggttattgtaggaaggggaggcaaggtgggagtcaagggataagagtgtacattatacattatctcgggacaaaagttatgtttgtccatcctcaaggaagatgacacagcaggaaagatcagtctctgtgggggcagcttgagtatttatttctttccacatgtctttcctgcccctaccattagcttagagctgtgtacctccagaatttggtggtgagcagctccaaagataggtacaccaggaaggctagaaaagatttggtgcatataaagactgccagcatgaaaaccaggaaaactgcttttaactttcaagttagtgaatatccaaggaggatatacctgccctatccctaaactgagctgatgaggctctgatagggttcaaggttgtgtgacttctagttctgattccaacccaatagggccatctcacagccccatctctgcatattagtttctccggttggacccttaggctgaaacattgctatcttcctcctgtacatgcagcaggcctgttttttggctaaagaaagtaatgaaaggttcagtttagaaataacaggccaggcacagtggctcatgcctgtaatcccagcgctttgggaggatgaggcgcgtggatcatctgaggtaggagtttgagaccagcctgaccaaaatggtgaaaccccgtctctactaaaaatacaaaaataagccaggcatggtggtgggtgcctgcagtcccagctacttggaaggctgaggcaggagaattgcttgagcccaggaggcggaggttgcagtgagctgagatcgcgccactgcactccaacctgggcaagaagagcaaaactccgtctcaaaaaaaaaaaaaaaaaagaaagaaagaaaaaagaaataacaggccaggtgtggtggctcatgcctgtaatcccagaattttgggaggccaaggcaagcagatcatttatggtcaggagttcgagaccagcctggccaacatggtgaaacccccgtctctattaaaactacaaaaattagccaggtgtggtggtaggcgcctataatcccagctactgaggagggtgaggtaggagaattgcttgaacctgggaggcggacgttgcagtaagctgagatcacaccactgcactccagcctgggacagaccaagactccgtctcaaaaaaaaagaaaagaaaagaaataacacaggtacaagtcatcaaaatcctgaattataattgattatactaagtaatgtgttgttatgagagatttttaaataaaaacttttaattgt

SEQ ID NO: 58530 - DNA, 1271 bp, Homo Sapiens
aactaagaaagaagacggtgttaaagaggaaaagcggaaaagggattcgtccacacaaccacccaaatctgcaaaacctccagcaggggggaagtcctcccagcagccctcgacaccccagcaggcaccccccgggcagccccagcagggcacatttgtggcccacaaggagatcaagttgacactgttgaataaggcggctgataaaggaagcaggaagcgctatgaaccatcagacaaggacaggcagagccctcctccagccaagcggcccaacacatccccagaccgaggttctcgggaccggaagtcaggtgggagactgggctccccgaagccagagcggcagagaggccagaactccaaagcccctgcagccccggctgacaggaagcgccagctgtcaccccagtccaagagctccagcaaggtcacgagcgtgcccggcaaagcctcggatcccggcgccgccagcaccaaatcagggaaggccagcacgctgtctcggcgggaggagctgctgaaacagctgaaggccgtggaggatgctattgcacgcaagcgggccaagatccccgggaaagcataggccgtgccccgaccggactggacgcatttttatacatagggtaagcgcagccattttggattttgcagttaatgtcttattttggctgtgattctttttaaaaagtaaaaaagaaaaaaaagtttctcagctggaaaagaagccacacaggaaatgacaacgacgctgaatcccagcctccctccccagagcagaagtcccgcaggacagacagacacagacagcgctagtgaccagcacggttctcatgtaaattacaagccccagccgccagccccgccttctcttcctcctcctccgtcttcttccctggccctggtcaggcctgtggagccccagctctgggtccctagcccgggtccaggcagccaggctccctcctgagctgagaaacggaacctcgcgaaccactggtggcacatccttctcctcccccgcccctgatcacccgcccccggatcagaaatatatctatattctcgactaaagtctcatcaggaaatatttcctgtcttttattttaagcatcaaattgttttagttgatttaaaaaggaaaaaatacagaaaagaccaaaaaaaggccaagggtgttgttggggcgtctgtctaatgtggtgggtctttttttgaggggtctcctaaaataaaatattttgataagcaaaaaaaaaaaaaaaaaa

SEQ ID NO: 58531 - DNA, 5385 bp, Homo Sapiens
aggaacccgagccgcacggaacggcggtggtggcccgcggagccggacggggcactatgaacgaagaggagcagtttgtaaacattgatttgaatgatgacaacatttgcagtgtttgtaaactggaaacagacaaagaaacactctccttctgccacatttgttttgagctaaatattgagggggtaccaaagtctgatctcttgcacaccaaatcattaaggggccataaagactgctttgaaaaataccatttaattgcaaaccagggttgtcctcgatctaagctttcaaaaagtacttatgaagaagttaaaaccattttgagtaagaagataaactggattgtgcagtatgcacaaaataaggatctggattcagattctgaatgttctaaaaacccccagcatcatctgtttaatttcaggcataagccagaagaaaaattactcccacagtttgagtcccaagtaccaaaatattctgcaaaatggatagatggaagtgcaggtggcatctctaactgtacacaaagaattttggagtagagggaaaatacagactttggactttctatgttacaagattcaggtgccactttatgtcgtaacagtgtattgtggcctcatagtcacaaccaggcacagaaaaaagaagagacaatctctagtccagaggctaatgtccagacccagtatccacattacagcagagaggaattgaattcgatgactcttggtgaggtagagcaactgaatgcaaagctcctacagcaaatccaggaagtttttgaagagttacctcaccaagtgcaagaaaaagattctttggcctcacagctccatgtccgccacgttgccatcgaacagcttctgaagaactgttctaagttaccatgtctgcaagtagggcgaacaggaatgaagtcgcacctacccataaacaactgacctaaacagacttacttcgtatgccctgccctttattggtctcccagacatgcaaactttgaagaagtttgaagaaagttgtggtccgtttttttatggtcattaaatttgccaaacataaggcagtatttaacatctttgtcaaataaagcagatcattatactctagtcttctagggctaatcattttggctcatttggggactcttttttcccagaattactaaacaaattttatcacatgtgactacttaaatatactgttacagtgtcattttattaaacattttaattcacctgtcaaaacaacagattaactccttagtgtaaactactagagataatttttaagagggaaatggaattcatatcacctcttatttattatgagcaatattttaatataaaaattttatatgtgaaaatgctattttaggtactttgccattctatttataaatgtgtatttgagtggttctgtatatttatttacattatcatgtgtgaatatgttcacccatatttcaggtcactgcattttattctcttaatacaatgttttcacaacggttaccttgctttccaaagataaatatattttggattagaaatctgagttgttttaatttctaatacctcttataaaagaagaattaataactttttaaagcagtattcaggtaaatacaatacattattttgttttctaacaaaagcagttcttagttcaggaagaaaagactaatctggcttctatgtcaatttgtctccatagaaatgaaagcctcctcttgcttctttcattattagcttcacaccagtgactgtgatgcattagaatttggacagagtaagtcaagcctcacttccaattcaaatataatgtctatcttcaaattgagtgtgctgtgaaattgttctgtctttgaaaaaaaaaagtaagattattttgtgtgccactttgggtaaagtttcaagaatacttaaactgtccaaattgtattatcaccatcattgaacttagtgctcaaagaaagcattgtgaggtatttttctaaactttagactctatagagaaatataggattgttctacagaagaaaagcaaaactcctaattaaaaaaaaataaacctatgtattaagagaatgttctcgtaagttgcctatgatgcttccaaagagtttttatctaacagattgtgccaaacagctagataaattttaataatgtattacagtaaaggctataaccaatgcagaattaaaatgggctctaaattctgtttttaactcatgtttagaatgtacttatgaggtagatccttgcttgaaagtatctgctgaaaagcccagtaacgtggcagcttcatgcataaagatataaatgacatttgccttaaatttggcagcctaccctggcttgggtcagattttgttgttgaacacaagaaagtatttaagcaaagaaacacttcagtttaattgaaaacaactttttgtaatgctgacgtgttaaattggcctgagggtattaattgatatctgttgattttgtttttctttgaagtataacattactttttggagggaatttttgaaagatgctttcgatttctctcaattctttaagtcatgcaaaatgaatttaaaatccagggagtatggatgcattgccttagttttgatgagctttaaattaaatgtgtgcaatatcaaaatattcaaacttacaagctgggtaatacatttcctgattaatatcttagtgcttaattgttcccacgttttcaaatttgactttactcttttttggcgtaattcagtaagattgttaccagccagtgtgtttgcacacatttgggtttgtgtttagatgagttagggacagtcataaaagttggggatatgttgcatttgatatcaatggtagcatatttccagaatatgagccataagttgcagtcctgaatacaacagtgttatccaaagaaaggagttttctgacaaatatacatagctttgctaatgagtacggaacaagtggatgaacgtgtgcgtgtgctaaggtcttaagtgggactctgatttattccatttagatatttctacttaagctctaaaaaggagaggtgctcttaaaaaaaaaaactttgtggtgctggtactcacactactttatttggatgagttcctagtaaaaaaaactttttgttgaagtattttgcacagcagtttatccaaatgtttggtaaacttataatttagtcctatgttagttttcttaatcaaatatgcagttactgtgtatgcaaatataagtatcaggtacagagttctaacaagagaacatgaaatatcacaaatattgttttccacacttggctattctctacagttgttagtaatttttgagaatgttttgaagcatatctcatgtactactgtttaaaaagtggcaaaacagactgccagtcatccattactaaattttcagagcttatatgattaaggggagtgagataagacaaatctttttcacgttcagttttataatttgacacgttaaattgagttttaaaaattagaaaagtgtttttgaccacacaggttgttctctttaaagttcagccttatattgaagctaaaaatcaattatgttttactttgagattatcatcttatcctttgatcctcatattaatatctaaattagtcttttttaaaaggcatgcacttgagactccagtaatagatgattcaggcagcagaatagtgttttgttgtgtcgttgactatgcacaatggtggagcaaagacacattcttagtttttcaaaacacatgttcattttaccacaaagtgcccatttttatatacatttaaggattattttttcaatgtcaagttcatgttagtgatttcagaaatatagtcaaaatatatagtcaaatatatcttgacaggcatcttgagatttggtttttcattttactatatttatgactgaaaatggttttgtgttttctttatgttgtttatatattttttaccttagtgtttacactggtaaggcttgttagtccatttttgtagtttttttaaagtaaggttttagatctattcgtgttttaatgtttcccagtttgggttttgttttgttttggaagaatctgctttcattattaaattataaaatgtaaatgctctaaagtaggaatttttaaagagtaaattatttgtgtagcttattaggaggttcaggttagtgaccataaagtgggttacttgtacatgaaaatttgaaatggtaccatgtaaaattcttctattgtcaactttttctgatgtatgccagttcatttactgacaaatgttgttactaagtgcttattaagaagtgtaatacgctataaaaaagttaatactttttgttcagatgtaaggcaaagataattgatgccgtttcagtgtatgattgtattgttaacttttacgttggtgggagtaactatttgaggaaatttgtggtgagaattagtaagagataaaacccccaacagtttattcttaccaagtaaagttttgtggtcatggggcagggaagagtttatttaccagaatactagagccctcacacaaaataaaggtaacttggaagagggctataatgcttgcatctcagtattttcatttcacttcatcctttcataattgccttgattatggtgcagtctaacctattaagcaacttctggctatggtaacattgatatgaaccatattatatcaagtctccaaaacatctagtttgttaacatacactttccctgttctttttagtttgagtccacattactaatacattttaataatatttaattatttcacaattttaagtttaccaaagtaaacaaaaattcatgaagatgagtattgccctctcccaaaaaaggtttaaagattagttgaacttccctcaactacacctaaagcaaaggggaattttagtaagtgtgtgtaccttgtttctttcagacacatctagaatgtttttctttcaccgtacctccaaaagaggcaatttagaaagtattaagtagtgacttttgttcagtcccattttgtgtgtgtgtgtgtgtgtgtgtgtgtgtgttaaccttgctttaaaacagtagcatatactatggtcattgaacttaatctctctggcgttagaaatttactttacaaaattgtgttaagacttttggaaaaagaaaatgaaactgctgtggtaaaaaccaagtttgtttcaaaaaagtaggcaattatttggctgttacattttctttgaaaactgcaataatttatatatttgtattgctctgcttgggaactgtatatatgcttgtctactatttttaattttacaacaataaaataagtattttgtt

SEQ ID NO: 58532 - DNA, 548 bp, Homo Sapiens
ccctcaaaaactgtttattatacaagtgagttttgagtcacgatgggcttatcggtaggatttctggtagcgagcgcgtgcaccagggcctccaaactttttggactcgcagcgacgagggtcagctaccagcagggtccggtcatactggatgaggatgtctttgatctccttcttggaagcctcatccacatctcatgggaaggacccatgctcactcacatttctggtaataggccaccagggctttggagatggactgacggatagcataaatctgggccacgtgaccaccaccctttacacggacacggatgtctacaccagcaaatcgctccttgccgagaagcagaactggctccagcagcttgtactgtagcgtgcgcggctcaatcatctccaggggccgcccgttcaccttgatgagaacattgccgcgtttgcagtgcgccacagctgtcgctgtcttcttgcggtcgaagacctgcaccgactgcagcggaacttggacggcatggctccgagcgtggactagaaacctcaacgcg

SEQ ID NO: 58533 - DNA, 572 bp, Homo Sapiens
taaaagcatttttttgcattttattcattcattccatggggtggtaattgatctattgtacaaatacagttttgtacaaaaaaatcacaaaatgttacaaaataaaaaaagtacaaactgcattacttaataaatatgactaaaagtagttaaagtggcaatgagattgattttaagttggaaacattgtttgacccagcaaaccatacaagctctgtttacagacatttctacatcaatacagggcaatcctattttgccttttgaaagaatgtaaagaaatattaagacagtgttctcctgctataactgccaaggttggctccagacatttatgccattagtttataaatctcttagctggattcaagaagttatataaagcaggaggcttatcttgtcacagagttttataccatgttaacattctcttacaacaacgtgacaaatgtaaataaaaacaactgagagcaccagacaatctactctacacatcaaccagggtacagaataatcattctgccatcagcaaatatcagactttcattcaagtaagacctgctactatccct

SEQ ID NO: 58534 - DNA, 567 bp, Homo Sapiens
tgtttttgttttttttggtctaaatagaaaaaaggaaaaggagaaagtaaattcttagggccagacctcgaaatgccccaagtgtccaattggcagctatagcatttgtgaggaggttcctttgccctcagacgagtagtttcaacatttcagtgaaaacaaaggttgcagaaagctgaaaacccagatcttgaaggttgctgtcatatatgtgtttgtgtttcttatattatttccttttgacttcagttttgcatcccaaatatgtatggggtggcattttaacagtcaatgagtcaaacagtcaaaggaggacaggaggggagccagctggtaggagggagcagcaaccgtgtgtggaccaagcgccatttttgttttatagacgtgtcttgaagggatggtcccagaatatacaaaatatacaatctgtcctaataaccaccccgcttgcttgcataggccatttgatggtcctaaaggcagtctttggagttgaggccagtggcagctagctaggaatgcgggtagatagagaccactactggatgtgtgagtgtggcatga

SEQ ID NO: 58535 - DNA, 565 bp, Homo Sapiens
gaaaatcccactttacttcaagtgaagtcactgggttgtccccatgaaatatctccacaatgggtgtgctagacctttactctctgtggcaccaccaagaccccctcaccctgccagagccctctgaagtgtactcagaatggaggggctggaagtggggccagtggtcctggtagtcagcctccccttctgacacaagaattatcgtggaacagcttgtgtgaccgatcaactggtctctccatctttaagccattgtcttgttgactctgttactgcagagtttggggaggtctcatggcttctcgcatcctatttcctgagcttccctgaagccaacttctggccactggtatgtgatgcgagcacagtgcctcctcctgctcctccaggaagcttctgctgattgaacgcaggccagatggcgagatccggagcaaccttcttagatcaagggaagaaaggggcacaagaggggagtaggtaaaaaaaaaaaaggcgctccctccctgatgactacagagccatcgtggcagccctgggcctccatttcagacgttcatct

SEQ ID NO: 58536 - DNA, 679 bp, Homo Sapiens
tttttcgttaaaggtatttttattgctagtacaagattgcaggatctaggcaaataatataacaattaaatgtgcaaatctcatgaaggtaaactacctttctgttctgtaatatttacccaaatagtcaaggctcaaacttgttaaactgtggagttactaaagaaggggggattttccaaattgtagaaacaagagtagtcagattttcccatccctactagctttctaggttaaattcaatgatgtgaaaacaagcatagggtagagtccatatgatattcatacaggaagaatgtccactggggaagctctttcggccctcattcaccacgtccttatcccctgtacacatcaagtcagaatgggctagcccatcagggaagcagcggtagaagaaatctgggcgtggcctccctacgatcagttttattgtgttggtaaagacgccattcagagccagggcaaggctggcagccaggcaggcttgtctgctgtctcttgtgtctgccttcttgagaaatttggccaggaagatcagagacagtggagagagaaatgcaataacaaacatcggctgggtggggaaatactccgcctccacgtaagggtttccgtagagccacatctcctccggctggatgaatctctggaacggggggagcagctcccgtaccaa

SEQ ID NO: 58537 - DNA, 2079 bp, Homo Sapiens
agggagcctgaaatttttgccatgattggtttgttagaaagagcaggcatcagactacttctgataaaattgtttggaaggtcacgacctcgcaaaaacttttcaagagcaacaaggaagaattctgctgtgaagaacacagtgtacggatcctccgcatattatctcaacagaggacagtagctcaggaggcagcttcaaacggtgacctgtggcctgggccatctcttcgtcatgtgcttcacttttccctgtttccctgtgaactggcttccatggttctgtagggtagtgagtcggggttgtggctgcagcagagcaggagatgcttgcccgagtgggagcaacccacccccgtgtccccaatgcctcactcctggcttctagtgcagccctttgtagactcacctcgcaagaaggaagatctgcctggagacctgatcccagtccagctttttgaccataggtcatctttgtccccttgctcctttgcatcatgtcataaaatttgaggatatcagctgattattttttcttccaagaatgaaaatcaagcagaattgattcctacacgaaaaaaaagcacacgaatgccaaacctttcctttggtggactggacactaaccagatgagagtaaatttcttatccgtggacgtatgtaagctactgctgctgtgtgctctccacagccatatttattgtattaaacaatcagcactaaaccttcaaaaattgcccagtgttcctagttaaatgttcagaggggagaaatagatatattttaaataatgttttgctaatgaaaagagtaaatatttttgtttaaatcagcaaaaactttccattattttatatttccgtctactatacctaaaacaaaagattgccgttatacctgggttccgctgatgcagtcagccagcacctcctcacatgcacacatgattagacataggtgcactcggtaccaagagtccattttatggtccagcatatactccattgattcatcatcactgcatgtgttcagccagtgtatctcacactatccatacaaatctaaaattgatactggaaatgttattataggaggcagtgatcgcatttaaaatcaggccacctacaagtttaattttcaacatctcatgtttttatttgtcccattacagcctcaaatgttggtcataaaaaaaatttaggctaccaaagtttaaagaataaaatgaaaattttataagaacttacattaaaaactcagtagtttgcatgagtaagaactccttgagatacacagatccccccacatttgtatttaaaataattggtgaggcattgaaatccagaattataagaaagcattactgaatatgtgtgttataaaatcaatattattataaacaaaataggaagctagaaatatttgggatcacagtaatagcttttctcaaatatacttttagaattgaatgtacattatcctatatgtaaaaaagcaaattattaattttaatggagctctcgattgacctttttagcatacttttatagcatgtatattaaaatagaatatattttagcaaaagattgccataaaaccctgacttggctcattttgatatttgcactgtgaagagggcttaaattccaatgtagcaatgtggtggcagacaaatgaaaaactaggaagttctttcacagtaatgcctagttgttccaaatttgctatatttggaggtgctctactggtacttcctgcttgactctctgacctgtgggatgcacattcttccccagcgctttttccttgttgtggtgacgtacattcactatctgagagtgaaagaccacacacacccctctttttaaaattattgtatctcttccttttcactttggtttgaacaaagatagtgtcaccttgttccgtgaaaaagaaaaagcataaacagtgtatatttagggtatatgggtgatagcttatgatgcgtgtcaatcagttctctgaatcttttactgaaactgagacaggaaaataaaactgaaacaaatcataaaaaaaaaaaaaaaaaaaaaaaaa

SEQ ID NO: 58538 - DNA, 2269 bp, Homo Sapiens
ccacccccggccccgaagctccgccacccgccgccatgagtagctttggagctggcaaaaccaaagaagttatcttcagtgtggaggatggctccgtgaaaatgttcctgaggggccgccctgtgcccatgatgatcccagacgagctggcacccacctacagcctggacacacgctcggagctgccttcttgccggctcaagctggagtgggtctatggctaccgtggccgagactgccgggccaacctttatttgctgcccaccggggagatagtgtactttgtggcctccgtagccgtgctatacagcgtggaggagcagaggcagcgacactacctgggacacaacgatgacatcaaatgcttggccatccacccagatatggtcaccatcgccacgggacaggtggcgggaaccactaaggaagggaagccgctgccgccccacgtgcgcatctgggactcagtttccctctccaccttacacgtgctgggcttgggggtgtttgacagagccgtgtgctgtgtgggcttctccaaatctaatggaggcaacctgctgtgtgcagtggatgaatccaatgatcacatgctctcggtgtgggactgggccaaggagaccaaggtggtggatgtcaagtgctccaatgaggctgtattggtggccaccttccaccccacggaccccactgtgcttatcacctgcgggaaatctcacatctacttctggaccttggaggggggcagcttgagcaagcggcaaggcctctttgagaaacatgagaaaccgaagtatgtgctgtgtgtgacctttttggaaggtggcgacgtggtcacgggggactctggggggaacctctatgtttggggcaaaggtgggaaccgtatcacacaggcggtgctgggcgcccacgacggcggcgtgtttgggctctgcgccctgcgggacgggacgctggtgtctggagggggccgtgatcggcgggtggtcctctggggttctgactacagcaagctgcaggaagtggaggtccctgaggactttggccctgtgcgcaccgtggcagagggccacggagacacactgtacgtggggaccacccgcaattccatcctgcagggctccgtgcacacaggcttctcactgctggtccagggccatgtggaagagctgtggggcctggccacacaccccagtcgggcccagtttgtgacctgcgggcaggataagctggtgcatctatggagctcagattcccaccagcccctgtggagcaggatcatcgaggaccctgcccgctcagccggcttccaccccagtggctctgtcctggctgtgggtacagtgactggcagatggctgctgctggacacggagacccatgacctggtggctatccacacagacggcaatgaacagatctcagtggtcagcttctccccagacggggcgtacctggccgtgggctcccacgacaacttggtgtacgtgtacacggtggaccagggcggccgcaaggtcagccgcctgggcaagtgctcgggccattccagttttatcacccacctggattgggcccaggacagcagctgctttgtcaccaactccggggactatgagattctgtactgggacccggctacctgtaagcagatcaccagtgcggatgctgtgaggaacatggaatgggccacagctacttgtgtcctagggtttggggtgtttgggatctggtctgagggggcggacggcactgatatcaacgctgtggcccgctctcatgatgggaagttgctggcttcagctgatgactttggcaaagttcacctgtttagctacccctgctgtcagcctcgagccctcagccacaagtacggtggacacagcagccatgtgacaaatgtggccttcttgtgggatgacagcatggccctgaccacagggggcaaggacaccagtgtgctacagtggcgggtggtctgatgcggccagggaagagtcaggtgtcagggcaggaattctattttcgggagatgtctattgccgagtagagtaatatatacccagagtatgtctatagcagagggggttatgggggcgggagggtagactgacatacagaagtctctatttatccgggtgggaagagggagtcacatcgctttggggatccattggtgtttggtttggggtgttttttaagttttttcttttatatcatccagaaataaagacacgtacactaaaaaaaaaaaaaaaaaaaaaaa

SEQ ID NO: 58539 - DNA, 665 bp, Homo Sapiens
tttttttttttttttttcagggcacagagtttaatgtgaatcatgagatgagacaaaagcctcctccagggcgatgggaagacccagccccaaaccagactcttgagcacgcagccctaaaccagactccgggaaggggctgcgtggtcatgcaccgcctaagactcagaggtgaagatgggaagacccagccctaaaccatactcctggaaggggctgcgtggtcacgcatcgcctaagactcagaggtgaagatgggaagacccagccctaaaccagactcttggaataggctctgtggccacccatcgccgtaaggctccgggatggagacagcatggacagggacctcgcacaaaggcatgtcgggagggcctcctttccaaggcacagccccacctgctccttctcagcccacgacgggagcagagccatgtcgaagccgagccccacacagggtggacaaggacatggcctgacagctcctcagaaatccttagagatttttccaaacgcaggttaccagggcttctgcagagagaggggcagcaggacgtgctgctgacagtccctggggacttacactgacttgcagtgagagccacatctgccaccaggatggctcccagcaccaccgcgtcacaagcaccacactctccaccgtg

SEQ ID NO: 58540 - DNA, 494 bp, Homo Sapiens
ttttttttttacaaacaaagtgtgggtatatttggcaggtttgaggcaagcagaaaggagggtttgggtactctataaaaaaagatctgaaattcaaacatctgataaggccacaatgaagagatttccagcagtgggtgttgcaggatgctggcacccaaatcgccgcaggcttgcaaaggtgctatgcaaggtgaggaggcaggtgaggcaggcagtgcctctcacaggtccatgtctgggcctcctgaggatgtcttcagcggcactgagtcaaatccatcaggagtcctcttggaggtaaatgatttgatcttcccaaagagtgacttcttgctggtaaagatgaggtcgtcctctacatcctcgccttccatgatggcgcagctgtcagctgctggcaggtcacagtccttgagagtagcattcatcaccagcttggagtacttgtactctagtttttgattctttttccaaaagtagcaggtcaagac

SEQ ID NO: 58541 - DNA, 660 bp, Homo Sapiens
  misc_feature (507)..(507): n is a, c, g, or t
  misc_feature (562)..(562): n is a, c, g, or t
  misc_feature (568)..(568): n is a, c, g, or t
  misc_feature (600)..(600): n is a, c, g, or t
  misc_feature (619)..(619): n is a, c, g, or t
  misc_feature (631)..(631): n is a, c, g, or t
  misc_feature (648)..(648): n is a, c, g, or t
  misc_feature (657)..(657): n is a, c, g, or t
taatttctttttctgaggaacaaaattggccatttaaataaagttcttttctagtgagtaaagaggtttctcagagccagaaatcactgaaaagagagtctgtcgaccctgcccatggaaaagcccagagatttctctaaccacttcttgccaaacttcctagttttgtgattggatgtttcttggtttagcattgtttggtgctgaatacattttgcaattcttttgttctctgccctagagcttccattaccctggacttcaactcattaccaaattaaagaattcttttagaagatttcttttaagagtcaggtcacaacagaaagggcgccctcctgttctcctaaatctcaagggcatctcaggttgtgtctgctcttacgttgcaccttccttttgttcccttttaatgcagcagcacactgggctatagcagaggcagacctgatttgattatctgataccttttccacaaaaatcatatatcccctgcttccaggcccnactaatccaaataacatcttctagaacaacaggggaaagctcccagaaaggggtngaaaancctgtgacttcctggccagatccaccttgctncctgtcttcctaggggtcnaggtgttggagnatgtggaggagccccancaagggagnacc

SEQ ID NO: 58542 - DNA, 579 bp, Homo Sapiens
  misc_feature (314)..(314): n is a, c, g, or t
  misc_feature (409)..(409): n is a, c, g, or t
  misc_feature (491)..(491): n is a, c, g, or t
  misc_feature (523)..(523): n is a, c, g, or t
  misc_feature (549)..(549): n is a, c, g, or t
  misc_feature (569)..(569): n is a, c, g, or t
gtttgactgagtttactctggaggttttattaatttttttgtaaatcgggaacatatagttcatcaaggttttctaatacaactaggtcatgaaatggaattacagcatcaaaatagaattaaaaaatcattttgccatcaaaaagtcattgtttcctaggtatgactttcctattaatgataaagttagtacattctttggctactgttgttcactgggacctcggcacatcatctctatgcctgctacccaccagacaccagaaatggcttctaaggccttcatggccagctccagggaaactgtcttcctngtcaccatgaaagactttttctgagcacaaaccatttgttgcagttccaaggttattcatgggacacaccgagactgtcccttccacatgaactnaggtatcccccccaaatcccttaaacatacatcagtgaatacaggtatgcatcactatctacccatttaattcatcttcccnagattaactggccagtggctaagactagaccnttctaacaagtccttggtgatgatcntaacagatggaagatctggncaacaatttt

SEQ ID NO: 58543 - DNA, 532 bp, Homo Sapiens
ttttttgtccataatattttaatacttttccactttaaatactggttttaattctgtgattgtaacatggaagatccaactttattgtgtttaaaaaacatcatcaggatcataaagctattatagaagttactctacacactcccaaggtactttaaaatgattatgttttgagtctgtagatgaaccatgacaaaatccaaatacatcgtctgtacaactcggactaaatactggtgaaaagtgtttaattggacaaataactgataagcttaaagataaccagcacaatttcacaagagaaccagctcagcccaactaaaaatttcttaatagcaattgacactgaagttgtattaagtgtataaattagttgatgaaactgaacaaatagaaaacccattcctccttttccttattttgccttcttacacctcccttgcagatataaccctcctttggtttagctacccctgtggcaattccaaaccaagtactgcagtgatcatcctctacctcaaaaccaggagtc

SEQ ID NO: 58544 - DNA, 1498 bp, Homo Sapiens
cgccgccagctgggtgagcatggggcagccccagtggccaccggagctgtgtgagcaagtgacaggtgactttgacactgaggctggagctgtgtcctcctcagagcccactgtggccagagatgagccagagagcctagccctggctcagaagtcaccggcccccaaggtcaggaagccaggcaggaagccaccaacccctggcccggagaaagcagaggcagctgctggggaagagtcctgtggtgcctcccctacccctgctaccagtgccagcccacctggccccacactgaaggcccgcttccgcagtctgctggagaccgcctggctcaatggcctggctctgcccacctggggccacaagtcctcaagaccagaccagccctcaccctgcccacagctgctggacagccagagccatcacctgtagcactggttgccagtgctgtgtgtatagcagtcactctccacccttcccttctgcctgcccagctgccccggggccacgagtggatgctggggctgtggctgctcccctggaggggttccatctctgaccctgtggcccattcagggtgggctgaagagcccctgagcttttaacgtgagggtctttattggataggactactccctatttcttgcctagagaacacacatgggctttggagcccgacagacctgggcttgaatcccggctcgtgttcttgctgcaggacctgggcaagaaacttcacctctgctgagccctcattccccatgtgtaaaatgggacaacgcaacctacctcacagggttgttgtggggatgctgcctgatacataccctgtcaccatttggtctctgcttcctctctgggacagggcctagaattggaggcagagaaccttcctatagaaagtcttcgtgtgtcctaggacttggctatcgtagagtggtaccttaggcagtggatgtgactcacactttcaggagtcaccccccagcatttggggttgggttggccctactccagcctggagctccctgagggagcctgcactccctgctcccaatccccgctactggtgcagggatgcagcctggagctggcgtccttgttctgggcctgctgctgccgccaccccaggaggccccaggcctgtcctgaattgacatcagtgcttccctgaactgcctcccccacccctggcattatcccaggaaacttatgttttctagaagctaagcagctgctgggactcagggactggtgcaggtaggctgagtggcagctcagtcctagaaggtctctgaagatctggactgaggaccctgctactccccaagccagagcccatcagccaggcctgctgtgagccacctgcctgtggagtgctgagctcaaccaaaggctggcaagctctgggcctcatttaagggattctgatgagccgatgggccctggaggcagcccattaaagcatctggctcgtttttggaaaaaaaaaaaaaa

SEQ ID NO: 58545 - DNA, 477 bp, Homo Sapiens
tttttttttttttttttgtcaacctactcaccaaaaaatttgcactttgactcatattggcctattttaacatttcaaaatcatttaaagaaaaatatgactttttctgtcataattcccagtcttagtctctatctttgatcaaaaagaggatagggcaatacattaaattgacaaggcatataacagccactgaatctttctgttcatgagaagaaatcccagatacaccataaatgagatgcaaaccagcagtaagaatgatggcaaggtttctgtatttccatcagaaattgtggaaaagggcctaaaaccaggaaagacaaggccattaaaaaaatgtatttgaggccgggtgcggtggctgacacctgtaatcccagcactttgggatcacaggcataagccactacgcctggccagaaaaagccaaaaaaaaaaaaaaattagggctgggtgaggtggctgatgcctgta

SEQ ID NO: 58546 - DNA, 561 bp, Homo Sapiens
  misc_feature (480)..(480): n is a, c, g, or t
  misc_feature (507)..(507): n is a, c, g, or t
  misc_feature (512)..(512): n is a, c, g, or t
  misc_feature (524)..(524): n is a, c, g, or t
  misc_feature (534)..(534): n is a, c, g, or t
  misc_feature (549)..(549): n is a, c, g, or t
  misc_feature (552)..(552): n is a, c, g, or t
gggcagctttcatctgtgtttattttttttcatataaaagttacatgtttgaaatgtctgcaggaagatgccaccatcagacaggttagctggggcatatatattacaatgtaaccctgtggaggtcgtggggccggagcgggaagatgctcccagtgagggcctggggatttgcctgggcacactggggccaggcacagggtctgttctgaattcagggaaggtgaagagaccccacctctatccagctcaagcccaagaacaaggcagacagagctgtggacagcacccgaccacagacacggttctgcctgctgctggagtgagaggcctggtttctgaggctgcagcatggcactggcattgcctgtgctacagatggggactcctgcgagtctcacaaatacagggagaatttcagttcacacaacccaagggccctgtgtgcaaagcgggccttaaacgcgcacaggaacattnaacaaaacttggcaaggggaagggganaaaanatcaaggtttgnaatgaagggnctttaaaaagaaggnccnacttaaaac

SEQ ID NO: 58547 - DNA, 537 bp, Homo Sapiens
ccgttttttttccacattttattctgacatggtgggttttaaaaacaaaaggatgcgaacatttgcacttctcaatgtttttttttttcccatagatgtagtttcacttatttccttcaggctttttatcagcaagaagcaatgtctgattttgataccacccatttgctatgaaaatataagaaggcgtcatcttcaaagcaacactccagttgggcttcttcatcgtttagctgcatgatttcttctacgacatttgtaacagacacaacgtatatagaatttcagtttgggtttttttatccttttttttcttttttaaaataagtatgttttctgcttatttgtgttttcttttctttgaatatattgcacaatattttattattaaaaaaaggttttatgtctcaggcaaaaagtttttctccttcaatcgggaggtgttaatgtgtattattttctaaaagaggtaagtggttgtctgtgtggccatcctcaaaaggaacagaattgacaggtttataggatccaagtctg

SEQ ID NO: 58548 - DNA, 2072 bp, Homo Sapiens
cttcttatactcatgtacctttaaaacatctaagcaatttaaaataatccctgttgagtttaaattcgagatgcatttaggtaaattggataaattcaacatttgaataaatccgtcaggttttagatggtgggattgatgaactttggtactttctcaatccaaaactaatttatttggaactagtacgttatggcttctcagtcatgaaaagctcagttatttggggtctacattttctcactgagagccttgatattttgccttctttgttatgcattataacttgactgtatcaccactgagtatctgctgtatcagaagttcagaagaaaaggtaaaactgaaatcagaatgggggtagaggaagttaaaaacaagttatttaaaaagaactcttggtttttggatgacttgaattctgttaaatctgtgttcttggccttgcacttccgttcctcttccatctctatccctgctagtcacaatggcattttagaactagaatgccactctgtagaggttttcccttttgctctgttgtgcctatttgtctaattcatatctttctgtggagtttcatatgtccttaatctaaagtaacttaaaattggaatggaagaacaagtttcagaattatttacagtcttatacatagaacttctagtgtaatgtttggttgtaaggagaatgtgaatttgcaggtaaatgaattgtatggcaaccagacagatccctggggtttgggagaaatagagcttgagatttgaaaaaaaggtacaaggtacaaaacaactctaactgccagtgccaaagggctaatttttaagcatgtaagctttaccacagtcttgaaaaaaatattaaccataggttcattcagctgttttatttaacccttagttccctggtggttgatttttttttttaaatgggtctccagctttccagtgaaatgtgacactctcaatagaatgcataatgttggtttctaaagttacactccataattattgttattctgtagaaaactgtacagaaggtaaatagaatagcttcaatgggaatataatttaaatttttttaattttataaaaatttatttccattgcattaaaagaaatgggtagcatgtgtctttcagagaaaggagctatttggttattcactttgtcaatcttaggtttttttaaatctttaaacaatttcttctttgtgatgataaaaataatataaatttactgtttctgatcatgactgagtctattacttgtcatggcttttgtacgcaactgtgttttaaaaataccggttttgcctctttggttacatgtggtgagcatggatgtcaagattatttttcaactagattattcaatttgttttatatttcttatacttaatacttatgactacagtccaaatcagtcttttagaaggtgctcttgctaactgtggaatatttgacgacatgaaagtcctttttctttgctttcagtggttggctttcactgaaagaaagtgtaaaaaaagtcagaatttatagctttcactatgtccaagactaggactgggttataaagattttcttttgtgaaggaaaataaaagaaaatttgccactactgcatttactttactattgtaaacttaagattcattccttagtctttggaattttgatgtctcaaaaccagatgagtggaagtgctgaatttgcaaaataaagctaagaatgcttaactctgcactttaagttctactctgaccaaattgaagatgagcagagcagccctgaacagcattttgtttatacagtcttgtttaagaatagaatctttttaactcttcattttttgtctctgtggaagctgtgtaactctttttaaaatgcaatttaaaacattttgttattctaacaattctctcaaaaaacagcatttccaatggtaatcggtattgttacgctgtacttatgtattccctgtacctgaacacttgttgctgcctcacaagaaaatagaacttttatgttaaaaataaagtctgttcttcttgaaaaaaaaaaaaaaa

SEQ ID NO: 58549 - DNA, 515 bp, Homo Sapiens
cacatttttaactatttattgaatgaggcagtcaaagacagaatgggaaacaacacagaatccatgctctgctactggggttttgcttttttcttcgtcttggcaacttctcaaactatttggaggttatttcaccacaaaggaacatggactttaaagtccctggacaacttcacaatgacgataaaaaataataattaaaaaaataacaaattgtagaactaggactatttatatgtaaatttccctcccctccccccattacgtacagaaaagaacatataaagaacattagatagttttatataaaacaagcaaatacaagaatctgaaacttctctcaaaggttgagcaagacgtggagaatcttttaatgtcgcattaaaaaaacacattaaatacaccatcacacacatggggagagctgggaggagggaggaggagctgtccctgtactcaaggttcagagatttggcctgttgaaaagtcaggtgaattcagctactggagactca

SEQ ID NO: 58550 - DNA, 126755 bp, Homo Sapiens
gatccaaccaatgtctgccgtgcaccagaacacatcctctgcatggaagtcaaacacatacttgaaggttgtggctacatagagcatgtagcccccaactgtgtgaaccacaccctgtgggaagaatggggaacaggttagggtcttatgcccacccctactgaccaccaaatggaggctgggcagagctggaggaagatcctcctcagggattccagccctgccagcacccttttcacagcatccatctcccttccatctccttttctccatgctcccatctcatctcctttatcacactcctgatgacacatatgtctatcaggccatcattcataccagcaccctcagatggtatttcagagccacccacatcactcacacatgagcactcatagcacactcataatagtccctctgttgtgtatttgtgcccacacactcaattacacaccatcagagtgagtgggaaaaaaaagataattccctttgcttattccatccctacccccatctctatgaaagagaggccaaaattgtgtttctaaagacttattgagggatattccaaagcatatggagataatttaggggtggagtgggcagaaggtagagtgacatagctttcaagtcaatggaagaaacagttttcttaagtgtttccggctcccatggtgtgtgctggcagaggactacatgttaatagtgtgccaggtggaaggaattgaactctaagagttatggtcttagaagcctgagagggatctctgtgcccacccttggccttgagttaacagaatagctctccttcaaccaaaccatgggtgcatagggaaagaacatccatgtcagctgtatgaaaaccctccacctgaactgtctcaccctgggcctcaccacctatagattgaggatttatgtcttaatttgatttagaaaagacaatgctacatttccaaaactcagggttgtaggaaaaaaataatttcattacttgtttcctcagaaacttacttcttacccctacataatacacacacacacacacacacacacacacacacacacacacacacttgccttgggtttgcctgtggagccactggtgtacaggatgaagagtgggtcctcggcatcacaccactcgggctcacactcatcccctgcctcttgcatgagctcatgccaccacaagtcaatcccttggttccatgagatctgcagggatgggcagggaagaactgtgaacagctcaagatggggacaagatacacccgtaccttgcccctggagggaatgaggtgggacaggcaggtaggagtacaggaagggagagaaggcccttcaaggatggaatggaacagaaagaacaggagcagaacccaagcttactgagtactccaaccaccctgccatcctacccccatctctaccccagaactcctctcacctggcctcaggctgaggaggaacccttggctggtcccttcccatccttcaattctgagctgaaatgtcaccttcttggaaagcctttacctgaacagtatctgatagattgctacccccaaccctgctattattattgatcacaacaccatgtttctttcccacacagtacatatttcctgttattttgtttagttgtctacttgattactgtctccccatctagatagcgacatctatgaaggaggtgaaatgtctttcctcccgacccctgccatatctcccaacacctagcaaagtgcctggcactcagtcaatttttgttggatgaatgactatgcacacacaggtctacatacatacatatgtacttatgggactaggctcattagcagggatgcggacaccacacaattcagaaatgcaaaattagtcagagcttacaggtgaggtgggcacctgaccctgttagtagtaaaataagtcaacagatcttggtccaagcacttttgcctacatgtccagacccaatccacatctgcgtgtttcctaccctagctctgctcctgcctttacaccactggtaccaatagggtttcccatagagacttttgcttgaggggacaggttccattcagcaggaagctttgcttcaagttggtgaagaaggaccaaggtggacttctcccagtagaaggatgtccccctatgcctttgataattacttctggatctgtcatcctgaaacttctctaaattctcctttgaaactgttttacttttctgtctatatcacctctttgaacaccaattttgagtctaccatctgctgaatgaagttagatcccttgaatttgtccaaaatcttcagtgtacttcaataccagttctgccacttcctagctatatgaccttgggcaaatcactttaccttaagtctctccttttacaaatgaggacagtcattcttgccttaacagactcacaggatgtggtaaacaccaaaagaaaaaagtattatctagtaaacatcaagccttggattgccccaagggtagaggttggggtgagatgaggaagactgatgaatgtcaggagagacagaggttagttcagtgactactgggagttaaacttaagagtgtggggctgggcgcggtggctcacgcctgtaatcccagcactttgggaggccaaagtgggcagatcacctgaggtgaggagtgagttcaagaccagcctggccaacatggtgaaacctcatctctactaaaaatacaaaaagtagccaggcgtggtggtagacacctgtaatcccagctacttgggagggtgaggcaggagaatcacttgaaaccaggaagcagaagttgcagtaagccgagatcgtaccactgtacttcagcctgagcgacagagtgagactccatctcaaaaaacaaaaacaaaaacaaaaacaacaaaaaaaacccacaaaaacttaagagtgtgatgataggaactgtttggggtttgctttagctgtcacaaagtcctttcatattaattagattcttgtatgttcaatggccctggctggcaggtagacatgatggtgtaagataaatgccattctcccattataaggatatatgctaatttgttgtgtgcatatttggttaaaaaaacttctggagtgttagatatatagcttgataaattagaaaatgactctctaaccactccgttctttctgtaccacctgccccttatggtagagaatttgaaatttctggattatcaacatcataaaaacgacaagcctagaaaaaggaagaagagagagaaagctgcctacggttagaaaacataagaacacacctgatttggtctatccatatgcatctacacatacattgtcacatgggtactttttttcctgccaaatgatcacttgagatgggggcactaaggtattcaaccagaagtatcaatactgctttggacaaatggtgctggtctacagcactgtgaactgccacagaacaggcactaagtacatgtaaggacaaggcatagttacaactgtggctctgcaatgagggcactcttataatcttattatttcttttgtgggtgggtgtgtatatagaggtggaggggtcagagtactccaggtgtggaactgataactagcaccaggaagcagagtgaactcaattagcaaagcaacctttgattgtgaattaggtgtgtgcctatgaggccccaggctctgcaccaggaaaaggtctgaattttctaaaataagaattgaggagttggcctttgtccttggaccaggatagtctcaaggagggcagctgccatgtacgggagaggaatatgagggagctcatagacgatatggttgaggagggtccctgcaaaccctgccaggatctccctggaagattgtttaaggataaaggggtttggagccctgccaggatttttgcagctcttttgaaaactattttttaatttttaaatatggggcccattgtcagaaagatttttgcagctttgactgcaattctcagaccaacaacctggactttttaagcctatttttatgctctttggtattttggaaactggttattttcacctccaagaaacaaaaatccagtagcctttggcctgaaggtctctggtattaagaattacaagagtttgttatttcttttctggtctctgttttagaaatgccaatctgtctgttgcattaaggggaaggaaaaaacagctaacatttattgagtagttactatgtgccaaacaccttacatatattgacaaaacccgataacataggtataattattatccttatcttacagatggagaaacaagcgagagagcttaagtaatttgttcaagtttacacagcagcagatggcagagccaggatttgaacccaagtaatctggctccagagattacaatttaagccactaagtttgtcacctctttcaaaagaaagggtgtaggtcctgcctgagttttaaaaggaaagcagtatgccctaggaatcagatctgtctccgccatgctaatgagaatagagaaaaggggcttatatctaccattggcctaagaggttaatcatagcagatttagagtaagacaccctgtgaagatggtaaaatccagaggaatagtgagctttatgtgttgttttaggaagggaagctgtttccttttataacatgtgttatcatctctccattactgataaggaaactgaatcccagaggggagaattgacttactcaaggtcatacagctaaaaattggtctctggacttcaggcccactctttcctcgatactaatctgctttgagcacccccttatggatctcccttcttagaaccacctacaatatgacttttgttcagtttagcacttaatcatattacaaagttatatgcagtttataaatcccaaagcactatataaatgtatttaggaatctcctctgctgtcctgtataaaacttagattttcctttgtattaataatacatgtctaactccccaacttgacagtgaattcccaaagtcagggtctgaacctcctccacctcctcctcctcctgtctctcggctctgctccagctacctgcacagtaaatgttttctgacaggttaccttgtcccctctcccacaaaggtcctgagtatcaggataaaatgtgttctgctgttacctctctaagatccatactctataccaattcacagaggcagtaacggacatttaatttcaccacccttcagtggcttagatgtcaagttgcccaggggcaaggggaaggaggttaggtctggcagccacctcaatggggcaaacaggcaaagggcagatgagcacacagacaagcaaacagagaagcggtgcccacggcagtgcagaaatggatacctggggctgaacacgcttggatttctctttcagtttaccctgttaagagcccaggatgaaaagggtagtgaggagggtccaagtatacagggagtgggaggaaagggtcagtgtgtcataaaccccaaactcccttctcactggtcctcccagcttccattttcctgatcctgattccagcccctatatatgtaaaacccctaacactgattgggctttccaacttccctaaactagactacagcctctctagccctaagacccctcagggagcctcaagtcacagactcttactcaaccccagaactttgatccctcatgctgctcagcctggaggccatcactgggcatttctaccattcccaccagaagcctgggggtccaaagctaacaaaggccatattgtgagggctggactctggtccttccaaggtgggcatcccttaggccacaaagatagcccaccccacatcacagcctagtaatggagatgactatatattgtcactcaagttagacatttctaacacaagcctaggccctgaggatcccctgtgcccacaaggataccccaaccagcataggagtctcccttacaatcgcttgtgctatgttctcaaggtacaagggcctctctacccacagtcaaggtcaaagtcttccagttcccacctagccctgctagaggaggcattcctagaattgctcctggatcctcagtatactgatgagcaggcaaagaaggacatcaagaattttctaggcaggaaaagtgaaggaatttgagcctggagaaaggcatagcagtgccagactcacctgcacatctgggcatgacctcttaattgggggggactggctggtggagtcacccatgccgagctctgcccgccccaggtgcttgaccacaatgcagcatcttactgggaaacccctggagaagagaaaagcctaaagtggtagccttgttggctcaaagggaacttggcaagacccacccatgtccatttagggtagaggggacaaagggaacctggcactggggaaaggctcagtcaactcagacagtagccaaacacacttacttctcctgacacttctgcagggcctcgtcagccagctccttcaggttcacaagcttttcccccctgtagaaggcatctttggggagcaacagacattccaggccttagtaagccccatgctgcctagtgggcacaatgtccatagggcccttcctgagtaggcctcttaactctggctcttccagctgattcgagctgacagagggtcagctgaggtgggaccaggagagaaaaggcaggcagtctctaccctctatgctgagtagccccaaataccaatgagctgattggagaccaaggcttgaggtatggggggttctggagaagaggtgagagaattagtcacctgtagtgatgagaagactgcagctggaatccaagatccgttcacatagagactctgaagagaagcctgcaaactagggaagggaagaaagtctgagggagagaagaaagccccagggattgagtgaatgaagaaaggggttgctcatggaactttcaggatctctaagccagggtcctagaagaaactgaataactaatatggacctatgacacaaaccttctaagctccttagtttgttatttaagaccctccatcatctaggcccaacctacttctccagagccccacccccccgcctgccccttttcaccagcccaaactcctaccacaatggagtgcaaagccccaatgcgggcacatgccagcatggccaccacaagctctgggatcataggcatgtagatggccactcggtcccccttctgaatgcctgcaggtaaaagcacagaatatgaaccatgaacccttcttgctgctacttgctccctcccatccagctggcctccctcccagctgacctgttctcttcctctgttaccaaattctttccatcccttgccctctccccataagtctcagatactcagataccccaaggccagacccccagtcctttcccacacccccacactcaccctgttttcggagaacattgctgaactgacacacttggaccagaagctgatggtatgtgatctgagtggtctcccctggctcattgccctccctgagacataccagaaagaaccagtgattaggggtataacttcttccccaaacaagaaacaggcagagtcataaaatccattcagtgacactaaggcctggaactgttctatgaggatgagctatctgcccaccatcaatcttgccatcaccaatcttgagctgacgggtcagatactttggccattcaagatattttatacacatgttgtatgtcattagaaaatgcactgtccatctctgatccttgatgaaatggagtgacggccccttctcttccatcctagtaatgtattaaggagaagtgaaatcacagatgtgattccttctgatgaggcatcaagactgcattattcagagtagggtctccagatcacttgtgcctaaatcatctagaggatttgtagattcctgggccccagctcaaacatactgaattagaatcacagggtccaaggatctgcttctttattacaagatggtacaaggaattagtaggggattcttgagaattggccaggcgcggtggctcacgcctgtaatcccagcactttggaaggccaaggtggacagatcaaaggtcaggagtttgagaccagcctggccaacatggtgaaaccgcgtctctactaaaaatacaaaaattagctgggtgtggtggtgtgtgcctgtaatcccagctactggggaggctgaggcacgagaatcccttgaacccaggaggcagaggttgcagtgagctgagatcacactactgcactccagtctggatgacagagtgagtttccatcttgaataaataaataaagtttgagaatcgccatcctttatcaggtgatttctgtctacctcctcagccttgcctcccactccttcctaggctttagcctggtttacttcagtcattccttcatgcattcatttgcttattcaacaactactatgtgctatctacatgtatagaaataaggcaccaatgggcggggcgtggtggctctttcctgtaatcccaacacactaggagactgaggcaggtagatgacctgaagtcaggagtttgagaccagcctggccaatgtggtgaaaccatgcctctactaaaaatacaaaaattagctgggtgtggtggcacacgcctgtaatcccagctacttgggaggctgaggcaggagaatagcttgaagggaggtggaggttgtggtgagccaagatcacgccactgcactccagcctgggcgacagagtaagactccgtctcaaacaaacaaaaaaaagaagaaataaggcaccaatgaacaacataagtaagatacctgatatcatggagcttatattccaatgatagtgtgggtaataaacaaataacaaatataaccaggataatttcagattatgataagcattataaatagagcagaatgatataaaaatgagtgactagggagaaatacttttaaaaaatatactatcttgggtcaggcacggtggctcacacctgtaattctaacactttaggaggccaaagtgggcccatctattgaggccaagagttcaagaccagcctggcaacatagcaagaccgcatctctaaaaacattgagctggatccggctgggcacggtggctcatacctgtaatcccagcactttgggaggccgaggcaggtggatcacgtgaggtcaggagctcaagaccagcctgaccaacatggagaaaccccgtctctactaaaaatacaaaaatcagctgggtgtggtagtgcatgcttgtaatgccagctactcgggaggctgaggcaggagaatcacttgaatctgggaggcggaagttgcagtgggccaagattgtgccactgtactccagcctgggcaacaagaatgaaactctgtctcaaaaaaaaaaaaaaaaaattttagctgagtgtggtgtcatgcacctatagtcccagccactcagaaagatgagatgggaagatctcttggctcatgcctgtaatcccaacactttgggaggccaaggcaggaggatcacctgagaccaggagttcaagaccaatctgagcaacacagcaaaacctcattgctaaaaaaaaaaaaatcgttttcaattagctgagcatggtggtgcacacctgtagtctcagctactcaggaggttgaggcaggaagatcgcttgtaccctggaggtcaagcctgcagtgagctgtaatcatgtcactgaactccagcctggacaacagagtgagtccctgtctcaaaaaataaataaataaatgtttcccttagtggtttttttccaattttatgatttttttgaataagtaatacatacaagtgggactacataaaaagatacataatgagaagtgttctccccactcctatctcccaatcaccctgcctactggcaaaccacagtttgggttttgtgatttgttttttagagacagggtctcactctattgataggctggagtacagaggcacaatcatagctcactgcagcctccaactcctgggctcaagcaatcctcttacttcagcctcctgagtagctgggactacgggcacatgctaccacacctggctaatttttttattttaaaatttttcatagaggcagagtctcgatatattgtccagggtggtctccaaactcctggcctcaagcaaaactgcttcagcctctcaaagtgctgggattacaggcgtgagccaccatgcccagggcaaaacagttaccaatattctgtgtgactttccagaaacaatcaatattcagacaggaccattctttgtaggacacagggctagggtaattcaactagtgtggaatgaccaaaataattactttgcaagaagtctgtatcattatgatctttaataagacccttgagatatcattgaagaccaaaatttgaaaattgaatgttaaaaaactgaattttacaggaggctgaagcaggagaatcgcttgaatccgggaaatggaggttgcagcaagctgagaccgtgccatcgcactccagcctaggcgacaagagtgaaactctgtttaaaaaaaaaaaaaaaaaaaatttggccaggcacagaggctcacacctgtattcccagcactttgggaggccaaggcaggcagatcacctggggtcaggagtttgagaccagcctggccaacatggcaaaaccccatctctactaaaaatacaaaaattagccgggcatggtggtgcacgcctgtagtcccagctacttgggaggctaaggcgggaggatcatttgaacccagaaggtgaaggctacagcgagcggcgatcacaccactgcactccagcctgggaaacagagtaagactttgtctcaaaaaaaaaaaaaaaaggattttaatgttgttcagaaaagagatgaacacctcatagtccccagtcaagcacagggtaacaggggtaggaagaactgctctacttaagggacaggtctgtcagacaagcatatatactacatgcatttgtttacatagtctcattttttctacacaaatgatggcatacaatacacactattctgtatcttttgttaattattatatgcattcaataaaatgcacaaatcttatgtgtagaaattgatcatcttgatttttcaaatttaacaatataccttgatatcattcttcaccaagacttaaagaactatttctcttttttatttgttgttgttgttgtttttgagacagggtctcactctgtcactcaggctggggtgcagtggcaccatcacagctcactacagcctcaacctcccagactcaagtgatcctcccacctctgcctcttgagcagttgggactacaggccagagtcaccatgtctggctacctttttttttttttttttttttttgcaaagacaggatcctactatgttgctcaggctagtctggaactcctggcctcaagtgatcctccaatcctcctgcctcagccttccttccaaagtgttgggattacaggtgtgagccacggtgccaagcttaaagagctatttcattatctttctcagctgcaaaatattccactatttgtatgtactgtaatttatttaacaaataaatgcttcaatgaatatttttatttttatgtcactttactcacctgcaagtatatctgtaggatgaattaccagaagtggacctgttggttcaagagatgtgtgctttttttttttttttttcccaagatggagttttgctcctgttgcccaggctggagtaaaatggcgcgatcttggctcactgcaacctccgcctcctgggttcaggcaattcttctgcctcagactcctgagtagctgggattacaggcgtgcaccaccacacctggctaatttttgcattttagtagagatggggtttcaccatgttggtcaggttggtcttgaactcctgacgtcaggtgatccacctgccctggcctcccaaagtactgggattacaggcgtgagccaccgtgcctggctgatgtgtgcattttaaatattgataaatattagggaacaactactttaaataagatggtcctggaaggcctctctctggagaggtgatatttgagccaagacctgaataatgagaggtaggcaatcatactaattcttgggaagagtattctggggaaaaggagcatcaagtgaaaaggcactgagaccttttcaaagaaagaaagaaagacagtatggctagatttcagtgagcaagaagttgggtaagaatgagaggtaggcagcagccaaatcacgtagagccttgtaggcaatagtaagaagtttgaattttactgtaagtggatccctggtttcccttggcaagttcaggtccacctccacgcttttggccacatcattgcccctgctcagaatattctccctcctccttcagacaccagcaccatctggctctcccttagcaccacagaccattgcttcccctctccttccttactgcacagagcacttatgaaggaggtaactgaaacctagagagattattggtcacacaataataagtggcagagccaagaatagatgctcaggtcttctgatttcaagtcaggactctccctcatagtgtgaaggacagggactggcagggaagccaggccttttcttactaacagaggtcacacagaagattatcagcctttttccagttcctggctcgatgagtcagtaggctttaaccctcctagggatgagagaagccaaacacagggagcttactaaagtgggaaagaacagggagagaggaagctggcaaacggccctgaatgccagaggcagaaaagccatttccttaactggctcactgacaagtgccacaggaacttcagaacgtctccggttatggctgaatgccaacatatacatacccaagcacatgtgtccccatatgcaaaccacataccaactcacctatgtgcgctcacttgtataaaatcacatataaatatacaaacattctaggcataaaagctgcccatctgcacacataggcacaaacaaggataaatatatgcacccaggattcaaacatggacttatctgtatctgcaagtacaaccaccatatacatgtagccacctatgtgcacagtgtgccccttcagaaactctctatcaaatcattctgttttgccaggtgccacacatgtaatcccacactttgggaggctgaggtgggtagatcacttgaggccaggagtttgagaccggcctggccaacatggcgaagccccaactctactaaaaagacaaaaattagccgggcatggtggcgcatgcctgtaaacccagctactcaggaggctgtggtgggaggatcacctgagcccaggagatggaggttgcagtgagctgagattgcgccattgcactccaccctgggtgacagggcaagactgtctcaaaaaaaaaaaacacattctgttttatttttttcatgaaacgttccattatttgaaattatctcatgtatgttaattacttatatattatctgttttcttcactggaatataagctccatgatagcagagatctttttttttttttttttttttgagatggagtctcgctctgtcacccaggctggagtgcaatagtgcgatctcggctcactgcaacctccgcctccagggttcaagcaattctccctgcctcagcctcccaggtagttgggattacaggcacccaccatcacacctggctaatttttgtatttttagtagagacggggtttcaagatgttggccaggctggtctcacacccctgacctcaggtgatccgcctgcctcggcctcccaaagtgctgggattacaggcgtgagccactgcacccagctgacagcagagatcttatttgttttcttcactgctacatccctagcacctcaagtacagcctagtacatagagagtgcacaagaagaaataagcacaacctatgcaagtacaacttatttgagcccacttccaaccgtgaaacacacacacacacacacaccacagtgtgcattcctctccttggctatgggctcaagttatacattattgatataagcaccttactcattccagtgtcttctttctctgacatacacaccaggctggggcccctggctggttgggaaaggtgaggggcagggtattggcctactgcaaaatcccaagccctctaggatatcagaactcttttttttttttttttttgagacggagtcttgctctgttacccaggctggagtgcagtgccgcagtctcggctcactgcaagctgtgcttcctaggttcacgccattctcctgcctcagcctcccgagtagctgggaccacaggcgcctgccaccacgctcagctaattttttgtatatttagtagagacggggtttcaccgtgttagccaggatggtctcaatctcttgaccttgtgatccacccgcctcggcctcccaaagtgctgggattacaggtgtgagccaccgcgcccggccaggatatcagaactcttaaaagaacatccaatttagtctcttaactctgagatccaaagaggctattagctatgcttggcatcacagggtgggttaccacagcagagcagggaccacgacttaaggtccaggcctctttcctctacaccaggagctgcaagctcaaaaattggcaggatctaggcacggaatgtaaataagtggaccacatgaaagaaaatatatgataaagataagaaatagttccctttccacttccctataagaaaacagcagcacatgtataataaaccttagcctcagtttcaggggaacaatagggaaggggaaggacaggaaaactggcaaatgcatgctctggcaaaaggaggcatctagtacctaaacttggttcctgtcagcttttgcttgctaggaatcagggctcaatgttgtcaattttttcgatttttcaatagcagcctggaatctatttttgtcaaaacttttgaattggccaggcacggtggctcacgcctgtaatcccagcactctgggaggctgaggcgggcggatcatgaggtcaggagatcgagaggacggtgaaaccccatctctactaaaaatacaaaaaattagccgggggtggtggcgggcgcctgtagtcccagctactcgggaggctgaggcaggaggatggcgtgaacccaggaggtggagcttgcagtgagccaagatcacactactgcactgcactctgcactccagcctgggcgaccgagcgagactccgtctcaaaaaaaaaaaaaaaacttctgaatttatatgtgttgaccactaatttttttaaagctttaaggccagttgcagtggttcatgccataataccagcactctgggagggcaaagcaggaggactgtttgaggacaggagttcaagactggcctgggcaacatggtgagaacttgtctctacaaaaaattttataattagccaagcatggtagctaatgcctatggtcccagctactcgagaggctaaaataggaggatcacataagcccgggaggtcaaggctgcagtgagccacgttgatgctactatactctagcctagcaacagagaccctgtctcgcccctgcctaccaaaaaaaaaaaaaaaaaaaaaaggtttaaacactgtgaatcaaacaaaactattaatgagaaatttagctggtgggataacatggggaacccttggtataaaccaaactacttttccttcacctggaggccatatggttggtgtgacaacccatggtacacagtcactagtccttctcatcttcttcccctagggaacctcctccaaggagtcttctccaactacttcattctcacactctcgaaatttactttaacccattattgattcaaaatccatttagaattagactacctctcttcacatctatttctaccatcctagtccaaaactaccattaggtagttcagattatgtcacccttctgctcagaatgctcagatcacttcccatttcattttgagtaaaagtcaaagtcctcacaatggcctacatgatctagtccctcatttcctctctgtcctcacatacaactattctctcttcctctccctttccctctgctccagccaaacggcctccccagtgtttggcaaaagcaccaagaacatttaacctcagagcctttgccctctacttggaatgttctttccctagatagccacatgacttattccctatctttgagtcgttgctcaaatgttggcttctcagtaaggttatctttgatcaccacattaaaaaaaaaaaaatactccctgcgctcctctccagccccaggttctctgaattaacattttccatgaaatttttgttagtttctctttttctcacctacccaaaagctaaaagttctttcttcctcccaaagccctttatctcactttctttgtgatctgtttttctagcttttattatatttatttgggccttatctttcccattataccctgagctcttggagggcagagatcatgtcttcttctctgtctcctccaagcacaattggcacaataggtattcgagggtcatggttgaataattgaaagactggtaattgactaatgacagggaagactggtgctaccccccaacttttttttttttttttttttttgagacaatgtctcactatgttgcccaggctggtcttaaactctcgggctcaaatgattctcccacctcagcctccagagtagttgggactacaggcatgcaccactgcacccagctcccctctttatatgagaacgatagtcattgaattgaagattttaattccctagaactacaagcaaggcacaggataggaagaaacagctgagggaaagactgagttctttacagaggaatcagatggaggagaaacaggaggagaaacacccaggtgagaagagacaccaaacctgttatgagaggagatgagaggaacactgaactgtttattttgtggaagagaagatattgagagatgtgatagcaagtctcaaaaatctgtatcttcattgtctccaccccggtcaagctaccttcatctcttgcctggatgaccacaatgcccacctaactggtttcccacttcactcttgttcccttccagtccacacatcacccagcatgatctgtgatcttttttttttttttttttgagagagtctcagtctgtcacccaggctggaatgcagtggtgtgatcttgacttactgcaacctctgcctgccgggttcaaatgattctcctgcctcagcctcccaagtagctgggaccacaggtgcatgccaccatgcctggctaatttttgtatttttagtagagatgaagttttaccatgttagccagtctggtctcgaactcctgacctcaagtgatttgcctgccttggctcccaaagtgctgggattacaagcatgagccactgcacccggccacagaatgatctattaaaaacataaattggccaggcatggtggctcatgcctgtaatcccagcattttgggaagccaaggtgggaggattgcttgagcccaagagttcgagaccagactgggcaacatagcgaaatgctctctctactaaaaaaaaaaaaaaaaaaaaatagccaggtgtggtggcacatgcctatagtttcagctactcaggaggctgaggtgggaggatcacttgagcccaggaggtggagattacagtgagctgagatgttgccactgcactccagccagggcaatagagccagaccttgtctcaaaattaattaattaattaattaattaattaaacaacaataaaacaaaccacaaatcagatcatatcacctcctgcttaaaaccctttaacagcttccactgcatatagaagaaaatccgcactcctgctatgccttgtatcctccccaacttcatcttgtgccattctcctattctgcctactaggctccaaacatgctggccttctgactgatagaacatgccatattctttaactatctttccccaactcttcttgtgtttcaaatctcagcttaaatgtcacttcctagtgaagctttccctgaccaccctaagtagatcagctcttcttgttattcatcataacactgcttattttcttcacagcatttttctcaaactatacttcttttgttatttgtttacttattgttattgttaatattattaatagaattaatattacttgtttacttattattatttttgctaatttcctatcttccctactagacagaagacagtttctgaaggcagaggccaagttggtcttgttcactgctgaatccctcattgtctcgtacagaaccttgtatataataggtgttcagtaaatttttgctgaatgaatgcatgaatctaaaggatcattatggggaaaagtagactaatgtagtataactataaatggaaaatctacatcaattgggagagctccatattaaaaaaaaaacctttctgttagagatgtccaaagatggaaggcactccttcaggagtttcctgaccctggagatatcatgttgaatctgggatttgtagcgataccaaagagcagcctccacaatatggctggggaccaagcaagaccagtgtttctcaaagagtggtcagatagtgttaataatgcagtaccaagttcccatgcagcacaggattgttcaggttgggccagggtaaccctgacacctacttctactagattattctccagggagtggggccttgaaattttcattgcataagctccccatataattcatggttattgaagtttgagatgacctttacagcccttccaactttgagattctttgattctataaaatgaaaaaacaatgtgaaagagttctgtgatccataaagcactgcacaattgtggagcactcaagatataagtatacccacaagtcaatttccctttcaccagggaatgggagcaatgtaccttgactaattagcagcctaatgttccctctgggtgcttctgccctagctgcagtaagtatcaagaagggctgaaggaggaggtagatggaggcacaccccaaaaactgaaccacagattactcagaatgccagaggagggccagatatggtggctcatgcctgtaatcccaacactttaggggccgaggtgggaggatcacttgaagctaggagttagagactagactggacaacaaagcaagatcctgtcaaaaaaagaaagaaaagaaaagagaaaaagaaagaattccagaagaggatggtacttttgagactcaccactcttatttaccattgagaaacctatggcacagaaatagaaagtgatgacctcaaggttacttacaaattagtagcaacactattctaaagcactgttgtccaaaatggtagtcactagccacatatagctatcaaacactagaaatgtggcggaagaactggattatttattttacttaattttaattactataaatatcaatagttacatgtagctagtggcttccatgttggatagcacagttcttgagtctaaatgtctagttcagggccttctcctcctaaatgacatggcctccaaaaggggggtattgtttccaaattcagaattagcataaggaaaaaaataaaaatgtaggaactctgagaactgtgaggttgacaactaccaaggatggaattttagtgtacttaacagaaattcatcattctgtttggttttcccttagttccttagaaaaagttccttttgaaaacaccacagatttctggtttcaaatgatatctaacttgtagaccctaatgcagcctcactcagctcctgattcaaaaactggaatcaactgtcatcctatcacccaaatttggacgggcttttcaccaactcaaaactgatgaaactagagtaaatagcctcaatcagtggactatttatgaaatttctccctaaacattgattcctcacctattgagggagccaggactgtaccggccagtcttcaaaaggcagttaatgggccaggtgcagtagcacatgcctgtaatcccaacattttgggaggccaaggtgggaggatcacctgaggtcagaagttcgacaccagcctggccaacatggccaaaccccatctctactaaaaaaaaaaaaaaaaatttagccgggcatggtggcacgcacctgtagtcgcagctacttgggaggctgcacatgagaatctcttgaacctgggaggcagaggtcgtaatcagccaaaattgtgccactgcactccagcctgggcgacagagcgagactcagtctcaaaaaaaaaaaaaaaaaaaaaaggtcaggcatggtcaaggagatacaaatcaaaataacaatcagatcccacttcacactcactaagatggccataatcaaacaaacagacagtaacaagtgctgacaagcatgtgcagaaattggaaacctcatacattgccgggaatataaaatggttcagctactttggaaaacagtctggcagttcctcaataggttaaatatagacttaccatatgactcagcaattaaactcctagctatatacccaagagaattgaaaacatacatctacacaaaaacatgtacccaaaggtttgtagtagcgttattcatgacatcagaaagtgtaaacaacccaaatgtccaccaattgaggaatgaataaagaaaaatgtggggccaggtgtggtgactcatgcctgtaatcccagcactttgggaggctggggcgggtggatcacaaggtcaggtgttcaagaccagcctggccaacatggtgaaaccccgtctctactaaaaatacaaaaattagccgggcgtggtggccagtgcctgtacctcagctgctcgggaggctgaggtgggagaatcgcttgaacccgggaggcggaggttgcagtgagccgagatcatgccattgcactccagcctgggcgacaagagcaagactccatctcaaaaaaaaacaaaaaagaaagaaaagaaagaaaaagaaaggaaggaaggaaggaaggaaggaaggaaggaaggaaggaaggaaagaaagaaagaaagaaagaaggaaagaaagaaagaaagaaaaaaatgtgataacgttgagaggtgacagcgtgctggcagtcctcacagcccttgctcgctctcggcgcctcctctgcctgggctcccactttggcggcacttgaggagcccttcagcccaccgctgcactgtgggagcccctttctgggctggccaaggccggagctggctccctcagcttgcagggaggtgcggagggagaggcccgagcgggaaccggggctgcgcacggagcttgcgggccagctggagttccgagtgggcgtgggcttggcaggccccgcactcggagcagccggccggccctgccggccccaggcaatgaggggcttagcacccgggccagcagctgcggagggtgtactgggtaccccagcagtgccagcccaccagcactgcgctccatttctcgccaggccttagctgccttcccgcggggcagggctcgggacctgcagcccgccatgcctgagcctcccccacccccaccgtgggctcctgtgcggcccgagcccccccgacgagcaccgccccctgctcacggcacccagtcccatcggccacccaagggctgaggagtgcaggcacacggcgcaggactggcaggcagctccacctgcagccccagtgcgggatccactgggtgaagccagctgggctcctgagtctggtggggaagtggagaacctctaagtctagctaagggattgtaaatacaccaatctgcaccctctgtctagctcagggtttgtgaatgcaccaatggacactctgtatctagctactctggtggggccttggagaacctttatgtctagctcagggattgtaaatacaccaatcggcactctgtatctagctcaaggtttgtgaacacaccaatcagcaccctgtgtctagctcagggtttgtgaatgcaccaattgacactctgtatctagctactctggtggggacttggagaacctttgtgttggcactctgtatctagctaatctggtggagatgtggagaacctttgtgtctagctcagggattgtaaacgcaccaatcggcaccctgtcaaaacagaccacttggctctaccaatcagcaggatgtgggtggggccagataagagaataaaagcaggctgccccagccagcagtggtaacccgctcaggtccccttccacactgtggaagctttgttcttttgctctttgcaataaatcttgctgctgctcactctttgggtccacactgcttttatgagctgtaacactcactgtgaaggtctgcaggttcactcctgagccagcgagaccacaaacccaccagaaggaagaaactccgaacacatccgaacatcagaaggaacaaactccagacgtgccaccttaagagctgtaacactcaccgtgagggtccacggcttcattcttgaagtcagtgagaccaagaacccaccaattccggacacaatgtgatacagttatacaatgcaacattattcagcaatgtaaaaggatgaagtactgatatatggtataacatggatgaacttttttttttttaagacagtctcactttgttgcccaggctggagtgtggtggcatgatcttggctcactgcaacctccgtctcctgggttcaagcaattctcctgcctcagcctcccaagtacctggaattacaagcatgcaccaccatggccggctaatttttatatttttagtagagatggggtttcaccatgttggccaggctggtctcaaactgccaagctcaggtgatccaccaacctcaggtgatccacccacctcagcctcccaaagtgctgggattacagacatgagccactgcatccggcctataacatggatgaaccttgaaaacattatgcttagtgaaagaaaccagacacaaagggccacgtgttatatgattccatttatatgaaacatccagaataaggcagagccttagagacagaaagtagattagtggttgcctagagctggaggagaagaagttgggggaaaatgaaaaatgactgctaatgagtattgcacttcttttgggggtgatgaaaattttctaaaattgaaagttgtacacctttgcaaatatattaaaaatatgaattgtatactttaaatgggtgaattatatggtataaattatatctcaataaaaaatataattgcaattttgattggaattgcaataaatgtacagattaatttggaaaatacagacatctttacaaaccttcctttccagaaaggttgtaactattcattcattagaaagattaagcactattcattcattcattcttgcctctttctatttttttttttcctttttttgagacagtctagctctgttgcccaggctggagtgcagtggtgctatctcggctcactgcaacctccgcctcccgggttcaagcaattcttatgtctcagcctcccgagtagctgggactacaggcccccgccaccacaggctaatttttatatttttagtagagacagggtttcaccatgttggccaggctcttgacctcaagtgatccgcccgccttggcctcccaaagtgctaggattgcaggcgtgagccaccacgcccagcctgtttatttctaaagacaacacttgggcacttatttttttctagcactagagtcctatgtagacatctgtttccctcactggattatgagttccttaatggcagacaggatatctttttatatgttttctccttagtgcttaccacaaaggccaatacacagtgagcacttaatacataattgtaaaatgaatagataaaagaatgaataaataaatgaacaaacttatctctgcttatatgaccagctggatccaagatgatcaaagagagaaagtatggaaggagaggggataagataggatacagataaacaagatagatgctggacaggcagaggaaagacaagagtggaatttgtggaatggattttggaatcatgtcaagaagtgtttcttgagatcctacagtgggctcagtctgggactctgtgaagaggctggaagagaaccctggagctgaggttcagagtatgggactcctgccctgcagtctgggctattattgtaccctgtcctcttgccagctattttcaggccttgatccaaataccttttgcatgttccccttggccaaagtggctttggtgcccgatggattgtgtacctcttctcttttctcactgcctacatgcctacttacaggaggggaatcacacacttgttcctaccatcctgtgtcccatgctggccttacctataacaagtgaatgagggcagagcatttggaatgcagcccaaaagaggaatatgcctagagcagaaacagaaagtggaaagaaaatccaggggcatcattttatgtgtacatcaagtctctcaagtataatagacacatgcaaaaatattcattacaatggttctctattatctaggtcaaaggcagtttaaatcattagtcctcaatctacggtactctattcctgtgagtacctgcacagaaaaatatgaagagaataaatgtctagatcctcaacttccatatgtaatatttcctaacaatgatctgtctgagttggttcttctttctcactctcttttacaattacccttctcccacgttaaacaagaatgtcatagctctctcttatctcaaactttattatggtacaatgacagggtatgaacaaagtgttaaacaaagggacaatttgagaatgtataacttctgagggagagccccaagaaagcaaatcaatgagagcttctctgagaaatcagtattgaaagaattggcatcttaattcatccacgtaacaaactcatggcaagactacttgccttatatctcttagaattacaactcagaagtgaaacagttatcacagagtcatatattaacatatttatcttaagaaagaagttaggcaatttctaacacagtagatctgatttggctgattatgttgggtgataactggctatgcaaaacaggttgtatggtagatgtcttctataaattatatgagctaaatttgcagtgccaatgttttgaaagaggtataacctatatgtgcatatatatatatgtgtgtatataatatgtaaaatgttttggaaattcgattttttgcaatttttaaatcttatgataaaatttttagatatgaacattatgtcaagagttacataatttttcaaaattcttttaggtatataattttaagagtttaaggttattaatctaaataatttttcaatggtactttgtccctccccccaacatcagaattgtctgaggaggttacaaaaatacaagtcagaggtcttatcctctggagattctaactcaatagtctgggatagggtccagaaatctggatttctaacgacatcctcaggtaattatttacataaactaaaattgggaaaccctggctctgaatatggagtcatcagactagattgtttacccctaattcaatgtataatttacacaaactttcccctctctctgagcctattcttgtggtcttagcaagtacagcatggctatccatataaataaaattagatttctgtcagtttgtttcccatcatatgaaaacaactagacagatttttaacaaatccagatgttgtattaggactccctaacttcttttttgagacagggtctcacccaggctggagtgcagtagcacgatcaccgctcactgcagcctcaacctcccaggctcaagaaatcctcccacctcagcctcccaaatatctgggaccacaggcatgcatgaccatacccagctaattttttatttattattattattttttgagacagagtctcactctgtcacccaggccggagtgcagtggcatgatcttggctcacttcaacctctgcctcccaggttcaatcgattttcctgcctcagccacccgagtagctgggattacaggtgtgagccaccacgcctggcctaattttaaaattttttatagagatggggtctacctgtgttgcccaggctgatctcaaactcctgagttcagtgatcctccctcctcagtctcccaaagttctgggattacaggcatgagccactgtgcctggcagattctctaactcactatatgtggcagtttggaggacacctcaagtaaccatcctcaaaagcagctcagaaactaaagttcaacaagaaccctctgtgactgctcctttggatagattttcatgtattaaaatatcatggtcaaaaagaagcaaacgttggtttcaaaaattagtctctggtcaaaaaaatcacacttagaaatgcaggtgttcatatgctctagagatgttttctgtacgggcaactctgtgtgtaaagtattccagggtgaatagtttcagggttgtatttattttatttaaataaaataatgatgctccaagatggtaaaaccataaggtaaccatgataataaaccatgatagtaaaaccataagtagaccagaccttagaaccctagaagagggctgttctaaaaactttatatcccaaaaagagataataggtagtccaaggccctcctatatctgagattttgcagtcttctcttgtaccttctctaattcaaaattccaagctggccaggcacaacggctcacgtctgtgatcccagcactttgggaggctgaggcaggaagctcacctgaggtcaggaagttgagaccagcctggccaacatggcaaaaccacgtctccactaaaaatacaaaaaaaaaaaaaaaaaaattagctgggcatggtggtgtgtgcctgtaatcccagctactcaggaggctgaagcaggagaattgcttgaacccaggaggcagaggttacagcgagccaagatcacaccattgcactccagcctgggcaacaagagcaaaattctgtctcaaaataaaaataaaaataaaattcgctgattgtgttggtgcatgactgtgctcctagctactcaggaggctgaggtgggaggatcacttggaccttggagtttgaggctacagtgggccacaactgcaccactgcactccagcctgagcaacagagtgagacaaacaagggaaggaaagggaaggaaatgaaaggagaaagaggaaaaaggaaaaggagagagaaagagagaaagaaaaggaaaatcttaagtattatgagagattataaactgactggagagtgtggctgtcaatgaggctaatataatcttagatatgtaaagtgaaagaatggtaatagtaccctgttcaagtcagaccatagctggaatacttaatgagagatattggccaactaaagtatatccaggggagaccgacatggttgtttaggaagccacatcatatgaggaacctgagactgtggactcagtatcacttcatttataaaacaagaacactggactagatcaggggttttcaaactgagctttgcaaatccctagggattccagacacacacctcacagggaacacagtaacagggtggagaagcctacagaatgtggctctaggcctcccatccatgctccaaccagatcagcaccgctgttacctgttttaggtatagggttttggcataataataaaaatagctaatacactttttgccaagcactaagccctttatatagattattccaattcttccttacaacaatctatgtcacaggacttattatttccattttacagacatgaaaattgaggtttaaagaggtgaggtaacttgcccaactagtaagtattaaggtagagatgtaggaattgaatgagaatgacccagaatcagaatgataacttatggggattgttagggattgggatattggtactacaattcctgatttgtgtgggaattggaccaaatgacctctaaggactgaaactgagagtcttgaattctcagaggttcaagatgtgagacaccggggatcattaccagtgcccaacctctcccaaaccaaatccaggaagtgggggaaggcccatcctcaactccacgccttctgagttaattgttataaatgtggggctgccataaggcaagaacccctgctcccatctgaccacctagtatcttcaaaggagaggaggccagttcctcctctcccctaacttctcccagaaatgtagagaatttatccaggcagttccctgcatttgtgacagaaattctgaaggtcagtgccagaagtaacttaaaaaagagtcttgtacatccctaacagtttataagtgggaaaaagaaggcttagaaaagggcattaactaaagccattcttttcattaaatgtttactgaacatgccagtataagaagttggcccagacacaaactcaggtagctgatatgaagctcaggacactgaaacaggcctcaagacagagtcttcagagcaatacatttattattcatatgccacctacttccaaaaaaagtgactcggaaagtacagcctacttgtctcattttcaccactttagggaggtgttctgtaaagtgtcaagggtcataaaactcagggagaaatgagagaagcaggttagaaatccaccttaaacatgaaatcctccagctcacctccacaatctgctcacctcattcaagtggagaaagactgttcccaacaacaggtatttcccatgtatctcccattagctttgagtatttatgctaccagccacaaacaaccctcaggcaagaggaacagactccttcctcagccccttcattccaaaccttctaaaattcttgctttatggtgtcaacatcattatagaaaataaattaaataaataaataaataaacaaaatcctccctctttcttaccatctcaacagaaattcaacccgcctactgagtcaccacagagtcactacaggttgcaacagaacttctaaaaactgcttcctctcttcagaaacagtcatagaattctggaagattagagatgaaagggaccttgcagagtatctgtagttcatttcccatcatgcccacaaagagaaggcccagagagaggaagagaatggtctgaagtcatctttctcaaaatgagtgtttttctttaccaaatatatcttaatcaatagatatgctgttgtgaaactagtaaagatatagatgtagtgtgtgtatttgagaaggtggggatggttgagaaggtgaggcaagcccatgttttgtcaaggagatttgtcaaggtgatatggaaaatcagagccctagagtatattgtcctatcattcatgtccagggactctaaattatctaggtccatattctggagttcacttcagtgacatggggaggtagggactttttttttttttttttggcctcaaatacacacacacacatatgcctacaaggatctggggagctccaaatatcatactatggaattcatattcaggagcatacaaggatcctgagagcagagcttctgtcctagggtcaatcctaaagttgccttattctcaaaagctccagttcctgaagaaggattgaaatatactgagagccatgaagagacagtagtgatttcagctgagggtgagaatttaggtggctcagagataaccacagccttaggcaacccaaagcaaagcaaacaatggaaggaatcaacgataccaaatgtgttgggctttggttactggggacttctagaaaaagtagagactgagtagctagtataaatgatcagaatatcagccatcaaccactctttccaccctctccttataaaccttttacttaatcccccaaatccccgacagtcctccagtgttccttcaactagctaactcccttccactccttcagctacctctaacaccctcactgactctctctccctgaatgactatcccaataccttgtcactgatcattttcccatacatatacacatgcacccccactaacatatttatctgccacaccagggggaagacagcatgagaaagttggaaccaaagtctgtattttgcagggaaaatttagcccttggagcagatgaacgtgtgccttcaaaagaggcagtgtttatatagactaggagaatccttgactctttcctttcactttctccctgtctctccaccatctacacacctagttacctgtgctggtttctttccataatgaaaaaaatagctaatacactttctgccaagcactaagccctttatacagattaaattactgtaaaattatcaaatcactctaaaatgtcattgttccattccattcccaccagcagcatcctagttcaggactgaataacaaactctcagttctctggcttcacattcccatttccatatgtatccagatgaatcctcttaacctctgctgcgacttccgctgcatgcaatcctttcacagatctccaaaaatagtcaagatctcccatacctggacctcatccgctgttgatgacaaccgtaactcctctttcactccccagacccaatccaagtcagcaaattccataggttcttcattcaaaatagatccagaatttgaccacatctaaccatcttcatgactactactatggtctaaatcaccacaatctatcacctggatttctacaatagcctcctaattggttaccctgcttctacttttccccttctacagtctcttcttaatataaaagatagagcctaaatagaagccaaatcattatcacgtctgtgcttaagattgtctagtggtgtgggtgggcatggtggctcacacctgtaatcccagcactttgggaggccgaggcgggcgggtcacaaggtcaggagtttgagaccagcctggccaacatggtgaaaacctgtctctactaaaaatacaaaaattggccaggcgcagtggcacacgcctgtaatcccagcactttgggaggccgaggagagtggatcacgaggtcaagagatagagaccatcctggctaaaatggtgaaaccccatctctactaaaaatacaaaaaattagccgggcatggtggcgggcgcctgtagtaccagctgctcgggaagctgaggcaggagaatggtgtgaacccaggaggcagagcttgcagtgagcgaagattgtgccactgcactccagcctgggcaacagagcgagactccatctcaaaaaaaaataaaataaaatacaaaaatataaaaattagccaggcatgatggcgggtgcagtgagccgagatcgtaccactgcattccagcctgggcaacagagcgagactctgtctcaaaaaaaaaaaaaaaagattgtctagtggtttcccattttaccatgaataaaaggccagagtctacattggctttcaagatgtgacatgatctaatatcctgctggtgtcaatactactctctcttccctagctcacacattttagctacactaacttcctagctagtcttcaaacacaccaggcagcagcacatttgttctccacctacctggaacatttcccctccctaccccaactatctgcgtggcacactccatactttccttcagatctctgctcaaatgtcatatttatcaaaaggttctttccttatcagctcccactctgcactgtcacttccctttcccctgactctgctctatatttttctatagtactcatcactacctgtcatatacttactggtttctatgtttattgtctgtctcctcaagctggactataacctccatgagggcaagaactttgtttagaatagtgcctggcacttaataagttcttagtaagcatttattgaatgaataaattgttccctgcataaaccttttactctaaacatgcttggtcttctcactgttccaatataaataattgtggtggctaatatttaagtgcattcaatgtgccaggaatttgacatgtttttttttatcctattcaatcttacaaaactgacaactccatgagataaaagctatttttatccacgtttaacagttgagaaaactgaggctcaaagaggttaagtaacttgcccaagatcagacagctaattagtggcaaaaataggactcaaactgggttagtctgacaccaaaacacccattctcctaatctttatattatcctgcctccctataaggctttttcctttctgtgaactatttgtgtaagtagctctttgcagtttggcccataattcttttcaggcttttttttttttttttttttttgatggagtcttgctctgttgcccaggctggagtacattggcttgatctcggctcactgcaacctctgtctcctgggttcaagcaattctcctgtctcagcctcccaagtagctgggattacaggagtgcgccaccacacctggctatttttgtatttttagtagagatggggtttcgtcttgttggccaggctgatcttgaactcctgacctaaggtgatccgcccgcctcagcctcccaaagtgttgggattacaggcgtgagccactatgcctggcccaggctgtttttatgtagatctatttgttttgttttattttgtttttgagatggagtttcgctcttgtcgcccagggtggagtgcaatggcacgatctcggctcactacaacctctgcctcctgggttcaagccattctcctgcctcagcctcccaagtagctgcaattacaggcacctgccaccacatccagctgatttttgtattttttagtagagacagggtttcaccatgttggccaggctggtctcgaactcctgacctcaggtgatccacctgccttggcttcccaaagtgctgggattacaggcatgagccattgtgcccggccaatctatttggtctttccaaatagaatgtaaattccatgagactagggtctgggacatttaaacctaataacacattttatctggtattttaaagttaatttaaatcagtttggctaatgtggctaatttctctttttatctgtcacagccaagtgctggactactagaataatgaggtagtgtcacgagtgaaaaaaaatagttgactaggagtgagagtatctggagattagtctcagttctgtcttcaaacaggtgtatgacccttaggcaaatcacttagcttctttgtcccttaatctaccaatctttgaagagagttggcctagatggactctaacggtcacttcaagttctaaaaatactactattccgtgaacatttgcaatgtgtcaagccaaaagtaaaaggccaaattattccttaatatggttctattttggataatgggagtactttcctaagagcaccatttcctttgtggataatttcaatgactacacaatgtatgttccaaaacaagaaactagctacaaatgtggcttgttaatgccaccatagctgtctaaatgacataaagttaagaagaaagccataatgtgtttctataagaagtatatcaattggagcgaatcacagaaaagatgtcatttttaaaagcattagtaagaattagaacagaaagaagtgagctccaagagggagaactttgggaggaaaaggaggatttcatatgatagtgagattggaaaatattaaatatatgataaaggcttaaatagtacaaaaagaaaaacggtaagcaattattattattacttttattgttttttgagacagagtcttgctctgtcacccaggctggagggcagtggtgtgatcttggctcactgcaacctctgcctcccaggttcacgcgattcttctgcctcagcctcccaagtagctgggactgcaggtgtgcactaccatgcccagctaattttttttttgtatttttagtagagatgaggtttcactattttggccaggcttgtctagaactcctgacctcaggtgatctgcccgcctctgcttcccaaagtgttgggattacaggtataagccactgcacccagcccagtaagcaattattaacttcagagtaaataaaaatccgtacataaaaggaaatataaccacagtatgctattcttatgtaaactgattttaaattaactagaaaacagctataattatattgagaagaagagagaaggaagttagagaggtatataagaactaaattcttatctatcgtagtaagaaatcaatactttctttaaaaatgatgaaaaatagcagtataagcatatcatttaaaaatatagaggcaacaaagggatgtaaccacatatccggcatatttgcactttactttcttataataaaatgcaatttatttgtattttgcttttgctttactataaacataaaataattaaatagtaattgcctatatggtacttgtctcctgcctttttacccccatatccataatgcctaatgcagccctgagtatccaatatctttaacaattcttgttgagggagtgaccaatgtaaaaatggagtgaggatgtcttgtttttgagttacagaattttgcactggaagtaaatttagagattatttaatccagtgcttccccagtgggtgttccatggaatactgcttcttgtgatatcaatagcatgctggcaaaaagtgtttggggcttcaataaattcaggaaatcctatgttaaacaaaattaatcaggtatctctaatataggacatcttggagattttactatgctaatacacattgggaatctcacacaaaggcaatttattatgtagtgtttctcagactcaatcattttatgaattaagaagccccctactaatatctccagtaattagcagttcctgaagcattctttggaaaatgctgatctagtctactcctctcattttacagatggggaaagagaggctctccagagcctgttcaggtaagggtggtaggggaactggtgtctctagaaagaaagggcctcaggattctggaaaactctccagtgattgaaaactctggcctgtgtattctgttttccattaggcacctgagttctttcaaaccagggaacaaattcagatacaagcatttccttttatgatcttttttttcctctttttatttttcttattttatttttattactattactttttgagacagggtcttgctctgttgcccaggctggagtacagtggtgtgatctgtgctcactgcaacctccgcctcctgggctcaagcaatcctcccaccacagcctttcaagtaggtgggactacaggcgtgcaccaccatgcccagctaatttttgtcttttatgtagagagggagttttgccatgttgcccaggctggtctcgaactcttgagctcaagcaatccacctgccttggtctcccaaagtgctgggattacaggcatgaggcaccatgcccagcctatttctttcttttttgtgaaatagagatgggggtctcactgtgttgcccaggctggtctcaaactcctaagctcaagcaaccctcttgcctcagcctcccaaagtgctgggattacaggcatgagccaccatgcccggcctcctttgaagatctttaaaggttttctgatctttaaagagcctgggaaatgagcccaagtgttggctggagctcaagcataaagctctagagcagaagctaaagagagtctcaacagacacaatggacagtgaatttcagtgacaaactggcccccaactaagcaatggtagtataataatagaccactcacacctatacagtgttttccaataaacaaataagtgcttttacaacgttatctcatttgattcttacaacaatctagagagaaaaacaaggatagaattattatccccattttatggaagaggaaactgactcttagttaaatgccttgtctgtggttatataacatgttaatggcagagttgaaaggagaacctaaatttcttgtctctcaggttaaggctcttctcaatatatcacacaaactgggcaaagatattgagtgagtttcaatttaactctcccatgaagcatccaagctgctcctattggctagcttaaataattaatcaggccagacatggtggctcacactaatcccagcactttgggaggccaagacaggtggatcgcttgagttcaggagtttgagaacagcctgggcaacatggtgaaaccccatcattacaaaaaatactaaatacaaaatacaaaaattagccaaacgtggtggtgcatgtctgtagtcccacctactcaggaggctgaggtggcaggattgcttgagcaggggaggcagggcagaggttgcagtaagccaagatcatgccgctgctctccaggctgggcaacagagcaagatcctgtctccaaaaaaacaaaacaaaacaaaacaatacaaaaacaatagatcaactctgagtgctcatagattgtggcagaagcaacaccccaattattggaatttctaagtcctatttggattcggtatagtagtatctcctagacagctaaattcctgggagaagcagtcttagaaatttcctgctggggaggctgcatggcctagtggtacaagcaaggagtcaggcagacttgaatttgaatcctggctctaccacttattcactctatgaccttattcactacataacccttcaatgcttcatttgttcacctataaaatgaaactaagaattcctattttacaaacctgttgagaggccaaggtaaggaattagaggaataatagagtgtcatggttgtgtgtaagctctgtaattatactgcctaggtttgaatctcagccttgcttctagctagttgtttcacttcagatatgtcacttgacttctcagaatttcagttttcacctatgtaaaatgaggaaaacaaatagtgctttcataattattataagcatcaaaggagatagtatttgttaagcacttaagcatagtttctggcacacagctctgtaaaagataatgataatggtagtggtagtagtggtggtgaaaaacccaatactatttgtcttccaaagcaagaatgaggaagaaagctactcagtcttgttctcttccatttgccaatgccctttctccctcttcaactacaaagccaagaacactagactagaagtcaggacacttggctttgaatgtcagctctgtcacatactagttatgtgatctgaaggaagtcatgtagcttccttgaggtatttttcctcacctgaggcattaagttgatgacactttgcttactctactgggttgttgtaagtatcaaatgagtgtttttatctgccaccaagtataagatagatatttttaccagtaaaaagcaactttatctccaagctttttctcatggacatttcgatccagtacattgtagcagatgttggtagttgctcctttcatccactcaatgaagattttccctttagtcacatcaaagttgtaccgaaggaatgggccagggcatggagtcttccagtaaaattccttggcaatgtctccccagaattctgcaacagaaatggaagcccagatatcattaatcttctgagacatatttagcctcagaaggcttaccagtctatacacaggaccaaattataacttccttgccctaggacccaccacctgggtcccttctttacctgtctaatcttagcacccaccacttttttttttttggagatggaggctcactgtgacacctaggctggagtgcagtggcatgatctcggctcaccacaacctctgcctccccggttgaagcaattctcctgcctcagcctcccgagtagctgggactacaggcgcgtgccaccacgcctggctaatttttgtatttttagtagagacggggtttcactatgttggccaggctggtctcgaactcctgacctcgtgatccgcccgcctcggactcccaaagtgctgggattacaggcttgagccaccgcgcccggccagcagccaacactcttctaacccatcttctattctcttgggctgaatcttgactcaaattcttcctcctgtcctcaagactgcctactcactttttaccatctattaaaatcagagccacctagtactagcacaatgcctagcacaaaataggcaatcagtaattttttgttgctgttgcccaggcttgtcttaaactcctggactcagctgtcctcctgcctcagcctcccaagaagctgggattataggtacacaccgagttctgctgaaatcaggtacaatttttttcaccatctgtctaactagaaagtaaattttttaatgaagtaattagtaaaaagaaaaaattcttcacccacagaaccttccatgaccaactctttcttctcttaattcgtgcattctctctcagcaattatatattgagcatctccttctccagcttctacttatataagtgttattcactatgtgccaaatgtttctttaagcttttcatatgtattatctcatttaatccttaccacaactctagaagggaggcttttctcattttataaacttgaaaatcaaggctcagagaggttaaataacttgtctaaggttacacaattactaagtcaagatctaaacttccttgagacatttttgctaaaatctgaaagatgaatagaagtttttctccactcccatatgaaaaaaagagaccaagggcatatgttaggaggaactccttgaggctgaaacactgagaataagggaaagaatagcaggaattgatgcataaactgggcaaatcatgcaattctgtgtataataaggaatttggtatatatcccaagagcaatgaaaattcattgaagggttttaagcaagtaacatgatcaaatttacattcttaaaatatctgcctggctattctgcagaaaatgtactcaacaggtaaaacatatgaatgcagagaatttaggatagtctgagtactgaatcaagagttagaggatgccaggcactgtggctcactcctgtaatcctagcactttgggaggccaaggcgggcggatcacctgaaatcaggagttcgagaccagcctgaccaacatggtgaaatcctgtctctactaaaaatacaaaaaaaaaaaaaaaattgccaggtgtggtagcgggtgcttgtattcctagctactcaggagcgtgaggcaggagaatcgcctgaacctgggaggtggaggttgcagtgagttgagattgcaccactgtactccagcctaggcaacagaacaagactctatctcaaaaaaaaaaaaaaaaaaaaaaaaaaatttggaggaaagagaagcaattagaaccgtaacaatggaagtaaccttacagattatcaccccctcatttcatttcataagaaataaaattcatagaagctaagtcatttgtttcaggttacacaatttagagcttatacaatctagttggagagataagattaacacatgaaatattttttaatgtacaagacagaatataattgaaagctaaatcacatagtgtacaacgttgtaatgtattaaagaaatccaaattaaatcaaccccaaggtgccattatatacctagaaaactagtaaaaatttaaaaaaattattaagcccaatgtctgggtggccctgggaaaacagatactcttacacaataatggcattgtaagaaattggcgcagtcttattagattgcaaggcaatgcatgacaagagccataaaactttttttttttaatttctattattattatttttttagctcggtgtctcgctctttgtcacccaggctggagtgcagtagcatgatctcagctcactgtaacctccatctccctggctcaagtgatccccccatctcagctgtaccccctcccccaccagtagctggaactacaggcgcacattgtttgtttgttttgtagaaacagggtttggccatattacccaggctgttcttaaactcctaagctcaagctttgggagcccaccttgccctcccaaaggatgctgggattataggtgtgggccaccacgcccagcccataaaactttttatacccttttctctgctatctcaactatagggaatagacttcaagaaaataatcacaaagaaaaaaagtgattagtaaagagatgtttatagcaacactataatagtgaaactggaaacaacccaatagcccaacaataacaaactgatgaaaactagtaatacaagtagtaataccatagaataataaatggccattaaagagaaagcaaatgagagctagtatttagtaaatgccattcatgtatcagggactggactaatctcatttaatctttatgacattatggtcttacaaagtatacattaattatcctaattttatagatgagaaaactgaagctcaggaagcacaggaaactctgccaaggaccacgcagctaataacgagagtacaaatactcaaaaatattttcaagtgataatagtaggcatatagtatataaaactatttataaaccacatttatgtccatcaacaaagaatgaagaaagctgaggtgtttttgtttttgttttgagacagggtatcgctgtgtcgcccaggctggagtgcagtggcacaatcttggctcactgcaatctccgtctcccgggttcaagcaattctcgtgccttagcctcctgagtagcaggattacagacgtgcgtcaccatgtttggctacaaaactgaattttatgcacacttagtttttctgggtttttttggggggggtaggggtgtgtgtgtgtgtgtgtgtgtgtgtgtgtgtcagaatctggatgagtggcatagtttctaagtactaaagatattcagaagaggaaaaaggtgagcataaattgggatgatcagtgaatgctctattggaagtggtggagtttgactaggtagagagaagcagaaggaaatgaacaaaggcaagaaggtgggaataaatgtgtatccaggatatcaaggagaatgatctatctagaatgaggggagtggtagcaagtagtgggagataagaatagagaggcagggtggagctagattatctggaggtcttaaaagaaaagcagaggccgggcgcggtggctcacgcctgtaatcccagcactttgggaggccgaggcgggcggatcacgaggtcaggagatcgagaccatcctggctaacacggtgaaagcccgtctctactaaaaatacaaaaaattagccgggcgtggtagcgggcgcctgtagtcccagctactcgggaggctgaggcaggagaatggcgtgaacccgggaggcggagcttgcagtgagccgagatcgcgccactgcactccagcctgggcgacagagcgagactccgtctcaaaaaaaaaagaaaaaaaaaaaaaaaagaaaagcagaattttaattagaaactgccagaaacagggaaccattgaaagtttttgcagtgacatatgaaagcatatttccataatatcaatctaatggtgtcttgataaatctactggaaagactcaagttggcgaaactaggcaagagaggacaaattaggaggctgcttccctggtagaaattctgtatttgatggaatttggtgaaatgcattctgtggggtcatggaagaggaatagcattgctattaggatatggattctgcagtcaaactgtcttggttcaaatcccaactccaccactttacacttgattgaatcctgtcttgcattacttggtaattgcttgatttatattgtatcagactaactactatttattgaatgtgtactgtgcatcaggcatgttatagcgcatacttattacacactttagacctcatacaaacccattaggcaagtattactagacctatcttatagatggaagaaaaggaatctcagacaggcttaaaaatttgcctaagaccccacagtaaatgaacagcagagccagggtctaaatctagatttttctggatttgattcgtggcccatgtttgtcccacaaccaaacatcatgctgcctcccaatgggggtgcaattttgactccttggctaggcgcagtagctcatgcacatgtaatcacagcactttgggaggccaagtaaggaggaaagcctgaggccaggagttcaagaccagcctgggcaacatggcaaaacctcgtctctccaaaaaatacaaaaaagtagctgggtgtcatggcgtccgcctgtagtcccagctacccaggaggctgaagcggaaagatcgcatgagcccaggagatgcaggctatagtgagcctagaacgggccactgcactccagcatgggtgacagagcaacaccttgtctcaaaacaaactatctatctatctatctatctatctatctatctgtctatctatctgtcctttacccagactgagggcaagggtagggggattttccttatacctttttttttttttttttttttttttttttttgagacaaagtcttgctctgtcgcccaggctggagtgcagtggtgctatcgtggctcactgcaacctctgcctcctgggttcaagcaattctcctgtctcagcctctcgagtagctgggattacaggtgcccgccaccacacccggctaatttttgtatttttagtggagacgggggtttcaccatgttggccaggctggtctcgaactcctgacctcaagtgatccgcccgcctcggcctcccaaagtgctgggattacaggcgtgagccactgctcctggccgattttcctcatacattttaacagacatggaaccatctatcagaacttctgaactattactaatacaatcccagcccaagttaaaaaaataaataaaacaacttgacatcgtagtaactcgttcagtcttataccgcgtaatttccattaggatgtccgatatactaaaaatagatcggggactccattactaatctgaggaccccaagatgggaaccagacccgttattgccctcaacagttcacaggttaagggtctcaggaggcagtggctgagctggtgtgaaagggaagcaaagaaagttctattcgtggccctcctcccttcaaggctcccgtcgccccttagagaccctcttttcgcctcaggaactccccttctcttcccatgaaactttcactctcttggccgacctccccgtcccaatctcaaggaacctcacttcttccctcacggaatcccgcgtctcctcgcaaaaacccgcatctccaccacggaccctccaagtctgcagggaactccccagctcccatggaaccctcgtctcctcccggaatcccttttccattttcaaagaaccgcaattcttccttcacagaacctccatctcctcacccacccctcagcttcccaagggagcccccgactcccccagggagcccccactcttctcctcactgacaccccaggcccgcccgggccgggcctcaccccgcggctcctccacggagcgccggtgcagctcgcggtagcgctgcagcgaggggacgtgcgcggagcggctgacctcgggcggcggagaccaactccgcgcccggcctccggctccagcttcctcctggccccggctcccgctgccgctccggacccgctcctcaggaagccccatcacgtcaagttcctagaaccgcggccgcctttgcggtcgcggcgggtgccgggactgagaaaacaggccgaactagaggcggggcctccgtagaggggcggggcctggtgagtgggggagtggcttagtctggcgggtgggcggtgccagagggggcggggccgtgtctggttggggagggatcgaggttggcaaggacagaaatactataaggaaaagtcgagggataggggtggagctgacttgccggaaggagtgacgccgtcgagtgaaagcagaaggggcggggccgggtgtgacaagggagagggtggaaccgtggagtgccaagggaggggcggggccaggcgggacaggagaggaggtgggcccatggagtgatggggagtaacccggctggttgtgacaggagaggaggcagagccatggagtgaccagagtggggtggggtcttggagtgacagataaggggttgggttaaggcaaggatcgaaagggaaagggatggactaaggagaggagttgagtaaggtccatcgcggagccgccccgtgatctgattgcacagtcctgactatcaccagttccttccaggtgacacccttccctccaggtcccccctctctgagccacacccacattctcgtcctccggaaaaacttctcccatgaccttgagggcatgctctggcgacagcacctcctctctgctcaccctggaaccagctcagattttctccctcttatgaggacatgtcttcaatctccttgccttcacaaatctccatccagatctaaagtacaagactcaataagtgaagactaggagacaccttcaggttttttgtaataagcccacctcctaattgcacaaatggcaaacccaggaaagggaaggaactggtgcacagtcagagagcaaataacgaccaagttagggccaaagctaggttctttgactccagatttggttttacttcctcgtcaggcttgaagctaaggcttgtaaaatatcaaagtctgtgcaaataggaaaaatcattcacattctctttttttgttgttgtttttgttttgagatggagtctctcgctctgtcgcccaggctggagtgcaatggcacaatctcggctgactgcaacctctgcctcctggattcaagcaattctcctgcctcagcctcccgagtagctggaattacaggtgcacaccaccacacccagctaatttttgtatttttagtagagatgggatttcaccatgttgtccaggctggtcttgaactcctgacctcaggtgatctgcccgccttgggctcccaaagtgctaggattacaggcgtgagccaccacacctggcccacattctcttctttccttcacaatctctttactccaccaagggaaacccccaccaccaccaccacaacctgggcttaattacctctagcttctctctagcccctccaccccagaaagaagtcaggcaggaccctcctccatctctcacctgcactcaccacaaagaagtgcccacctcaccatcatttcacagactggctgtcaaggcaggaaggattcttaaatatctaactccaagagtgattctgaggcctgaagcgggcagctcccacctcctgaagcctacacaggccttgtgaccccatctagcccagcctcccttcccagctacttccctgcactttgcccagctgactgtaaaccttgcacaccctaagctgaaaaaaaatctctctatgggagaccgagagtctgcccaatcccaaggagggcgggaatctgagggcccactgaaggagtacagacctcttggggtggacatagaccccaccaaggggtcagatactttcataaaggagatattcactgcaccgaagggacacacacttcactgacagtacatggactccactaagggagcacagatgttgctgggggttctcagatctgactgaagggccctgggccctgctaataggacatgaatggctttgaagggcacttaccctagtgaggagacatggatttcccctaagagatacagaggatatagactttactaaggagacgtggaccctaccagaggactcaaactccagtgaggagctgccaactacactgtgggagtggacatcactgagaaggtgcagacctcatcaagtggggaagggtcccaccagagggattagacctcagggtagtgtaatagaccctacaaacatcactgaggagataagaactctctggggtggggaaaggcacagacaatgggtacactttttggtgatagactgttaccctccctgggcactcttaccacacagctctgagtagccctctccttcctatcctctctcccaagtcctacacccaaaccccagagctgttcccgacacactgcttccccctcctgtctatagttgctactgcagctgctgtgtatatagtagatttttcaagcacttcaggccatccctgagactggtctggggttgggaagagaaaggatgtgtgtatagaggcttcaccagcccccctctcttcctgtggacttcacaatgaaagtttggaacagagacctcgtaaaagaaggaacctccctcatccttggatatggagaagtagtacaagctgtagtgtggttggaattttggagtggagagaggatggatgagtttggagggaatgaatctaccagattaaggcaatgatgatgatgatgatgatgccatttattgagtaggtgccaagccctatactaatcgctttccattctgttacttaatcctcatgacaaccctctaaaatgggtactattattctttccatttcacagatggggaaactgatagagagactaattgtcttgcccaagattacacagtgtttgagcggtggcagaatagaacccagacatccagaatatggagacctattccccaccttgccccactcctgccctaccatcactaccaccactccttctttctcaaagtgtcctttccagaaccacatcaaaaactcttaaaatgatggtaaatattcaggttccaaggacctcatcccagcctactgaatcatgatctctggagtggaatctggggatccgctttcaaagatcctaacacacactaaagtttgagaatgcggttgaaagaggagtcagaagtgtcggggtgcgggaagggatctgaggtcagaggagggatctgttgtccaaagaggcgtctgcagtcaaagaggcctggagatgaagcatgggctggggttttcaaaagggtttgggggtgaagacagagtctgaagtcgaaaaagaggtctaaggtcggaggaggagtctaaaatcggaggaggaggatctcggaattcaaggaggggtctggggtccgaggagtttggggtcagagacaggatctggggtcgagagggatttgcggtcagtgaaagggtctggggcccgaaaaggaagcctgggatttgaggaggacactagctgtattcaggctggaaggaggaaggggtttggtccctgagctgcgtaaagtgcagagccactgaagtctcgcttgccccgcgctctcccctcgaccctgcgctgccttcctggctgtccatctacacgcacctgtgtgccagctgcaggctgatagcgctgagcagacgggggcgagtcagaccgggacacggccgagggctgggagaggcgccccctcccggctgtcgcgaagatcaggccccgccctccgccctcccactcccccgccgcagccacttccggcaggcgctgcgctgctggggggcgcgggcgaggatggcggcggagaacgaggccagccaggagagcgccctgggcgcctactcgccagtggactacatgagcatcaccagcttcccgcggctgcccgaggacgagccggcgcccgcggccccgctgaggggccgcaaggacgaggacgcctttctgggagaccccgacaccggtgaggcccgctgaccccgtccctgccctgccttgggaagtccccggtcttccttcttctgtgtcaagcatccacctccagctccatctccttaattcatccccatcttcttggatctctcccttcttctcccttgtctctgttaattatttggtgaggaagggggtgcatttctgccttggaggcgtaggatgcgacaacggagaggatgctagggactgcagtagaagggattgggcttaccttctgggaagaaccaactaacgatgaaggaatgttgaaggggagatcctaaggaaccgctgtgatcacccagaagagggctttctctagccacagaggacaggataggagaaaccaagtcagagactgcagcaagagggatccaatctgtgccttaagagaagttccccacagccagggattgtgagaagcagagggtctgggagaagcggagaatctcttcatgtctagggaggggtaaagagaatatgattcccctctgttgggtgttgggagacggaggcatggactgcatgacctctcaaaagtccttggggactagaacgccttcactctcctgtggattaccccacccctccctgagccatggatctggccggggtattagtaaggtactctgctccctaggaagcagtctccagaattttactgtgttcccctcagccctctgctggaattgtgagaagtgggggtaagagaaggaggagacagggattggaagagacctgggggcaaagagctctctgtgcattccttccctgctgctcttcctcctagccatgtggcccagcttcatcctcccctccattcttcatccttcatcccccatccctctgtccctgcacgtcacttcctggcattagagcatccttctacctcactctcgcttcctcgcagtgcctgcacttgagccttgtctcttaccagcctggcagatgctgcttttccggcttggcccttccctagctgctcccagcctgaaagccccaaattctctcctcctctacactttctggtcatctggccctgaccagcagcccttgccaacctgactggactgcactctgtatggggtgggggtgaggagataatgaagatggagtttagaggtttatgggcgtcaaatgtcagggctgcggatcaaaacttattttccaaagggagtggaatcaggaggtagcagggagaggagtgggaagatgtgtcatgatggatatcagcctgaagctaggccttttattcagtagtcaggagtgagacttctggtcctaatacagccctgactcaccaagcgacaacaggcacacctaccctgtcctgggccttagtttcctcttccagctcaacagagaatgcctgtctctcttgacctagagattggaactgcctgacatgttttcttctggccctctgtaaatgtcttagcatttaccaaaatctatgattatttatttgtgcaattatctgattactccctgtctgtaagccccatgagggcagggatcatgattgttttgttcactctcctttctccagcatcaagaccttatccataggccgggcgcggtggctcatgcctgaggtgggtggatcacttgaggtcaggagttcaagacctgcctggccaacatggtgaaaccccatctctactaaaaatacaaaaattagctgggcatggtggtgggtgcctgtaatcctagctactcgggaggctgaggcaggagaatcactcgaactggggaggcagaggttacagtgagccgagatcactccactgcactccagcctgggtgacagagtgagactcagtctcaaaaagaaacaaaaaacaaaaaacaaaacaaaatacactggccggtgtggtggctcacacctgtaatcccagcactttgggatgctgaggcgggtggatcacctgaggtcaggagttcaaaaacagcctggccaacatgacaaaaccccatctctactaaaaatacaaaaaaaaaaaattagccaggcctggtggcaggtgtctgtaaccccagctactcaggaggctgaggcagaggttgcagtgagcgaagatcgcgccattgcactccagcctgggcaacagagtgagactctgtctcaaaaaaacaaacaaacaacaacaacaaaaaaaaccctcatctctatttatttattgggcactcaataattgttgaatgaataaatgcatgagagagaagatctcaggatgaaagaatggtaggagagaggatgaaagaatggtaggagagagcaagttccaaaacctcagggagtattttgggaagttcaatacaggctctgccctcacccctgtatggaaatccagcagagatcctagtcatctgagcttctgggagtttataccttatgccaaatttatgtgtcaggtttgtgtgttgccatcatttcagtgtaatcatttgaatgccatatctcccaatcctacttccaagccccaaggcttcctcggttcacctggaccagactacaggctgacatggcctcctgtgttctcaacctggtggtaccatctagtggcacagcaccatcctcttagccaggaccttggttgtgcccagctagcctctagcctgccattccctaaacccaagtgccaggcaccccacatcaggctctgtgggaaagagagctagacagtgatcattccaaggttgggaaatactttctttcttctgagctccaagcccttgtgttcctttctctcccaggcctgtgtctccagatgtcctgcaagtgcctcatctatagcatgttctattttgaactcatcatatcccttccccatgcacctgctcttcctccactgccattctccattaatgacactgccagtcacccagtctcccaataatgaatggcatgctggactcctccttttcttctcatttccaaatggtgatcaagtgctctctgcacccctcctaagtatcttccaaattcctactcatcatccctgtcatcaccactgtagactaagccaccaacctctcttatcaatattatttataggcttctagctactcctcctgcctcctccctcttgcccagtccccaccccaatccatccatcgcttctggtcatgtcactccctggttcagacatctttggtgattctgccgggcatagtggcatacacctgtaatcccagcattttgggaggctaaggtgggcagattgcttgagctcaggaattcagaaccagccggggcaacatggtgaaaccctgtctctagaaaaaatacaaaaattagccaggtgtggtggtgcatgcctgtctgtagtcccagctactcgggaggctgaggtgggcagatggcttgagccctgaaggttgaggctgcagtgagctgagattataccactgtactccagcctgggcaacagagtgagacactgtttcaaaattttatatatatatatatttatttatttatttattttagtgattctccccttaagggaataaacaacaagccagggatgaccctagcctctagccaagatcactctcctaaactctggacttgtataatcaattttgttcaggattattttgttataaacccagtttaactgagctacatccaaaaagagaattttactgggtagcataactgaaaagtccagggatatggggtttcaggcatagctggattaaggtacctaaaaaggaatggacttttctccatcttttgctctgccttcttttggtgggcttcattggcagaaggcctcccattttattaggggcaagatgcccccagcagctacaggcttacatcctaccaacttagcaacttaagtgtaatagaaagaggagcctttctctttcccagtagttccagcaaaataacaaagtttgggtcttattggcctggctttgttcacattgcctgttactgcacagaggtacctgttctgactggccaagtctgagttatatactttggtcagggatgagggagttggctgagagaggagagagaatgttccttaaaagaaaattgaatgagaagtggtatccaagcagataccagggatgagccctgaaggtaaaaattagatatctactaggccaactgcctccagacagcttcttatggtgtcccacaaatttataataaccaaaattgaacttgtcatctttctcccaaaagacttattccttctggttgcaaattaatctttttccagtatcctgctgttgctcttccctatcagtaaaatcaacactgttattgccctagctgttccacagtgcacatagtaggtactcagtaaatatttttattgtataaatcaataactttatgatggactggtggagtagagagtcttgaatagctatgatagggacatgtcacctttacctcctggatccttatatctgactggagaaaacaaattaaaccatacctagggccgggcacagtggctcacgcctgtaatgccaacactttgggaggccaaggcgggcggattgcttgaggccaggagtttgagaccagcctcatggccaacatggtgaagccccatctctactaaaaatacaaaaattagctgggcatggtggtgcatgcctataattccagcttcttgggaggctgaggcatgagaaatgcttgaacccaaaggcggaggttgcagtgagccgagattgcgccactgcattccagcctggcaggaagattatctctcaaaaacaaagcaataagtaccaagaaatagcaacaaaaattagcttgtaaggttggtttctgagggtagaaatggctcttgatgccatgtggagcaatgggaaggaggctttctagttacacagactcttggtcctgccacttattcattttattttattttatattttactttaaattttttgagatagggtttcaccctgtcgcccaggctggtgggcagtggctcactgcagcctcgaactaccaggctgaagtgatgctcttacctcagcctttcgagtagttgggacaacaggtgcacaccaccattcctggctaattaaaaaaatttttttgtagagacaggagtcttgctatgttgcccaggctggtcttgaatacctgggctcaaacaatcctcccacctcggcctcccaaagtgctgagattacagacgtgagccaccaaacctggcccacttactcattttatgacctgagatgggcaatatcacctttcttggtcttagttttctcatctgtaaagtggcgagagtgggacttatttcataaagtcttgggaacacttcaataaaggaatatatgtaaaatgcttaatatgtagtcagcatcaataaatataagttcaaaaccctttcccacacttcttttgaaacttctaatgccgggtgctgtggctcacgcctgtaatcccaacactttgggaggctgaggcgggatgattgtttgagctcaggagtttgagaacagcctggggaacatagcaagaccttgtctctattaacaacaacagcaacagcaacaacaacaacaacaacaacaagacatttctaggggccaaggagagttctgtgcctacagtgggtgtttaacgtctgtttgtttggatgaattccagttttatttacagactctgtgatgctgatgttgagggttagaggcaagcattatgaagtgagggagagtctcagaagataacctttttttgaaaataaagtttaaaaacagcagggtgcggtggcttatgcctgtaatcccaacactttgggaggctgaggcaggcagatcacctgaggtcaggagttcaagaccagactggccaacatggtgagaccctgcctctactaaaaatataaaaaattagctaggcgtggtggcatgtgcctgtaatcccagctactcaggagactgaggcaggagaatcacttgaacctgggagatggaggttgcagtgagccgagattgcgccactgcactccagcctgggcgacagagtgagactctgtctcaaaaacaaaaacaaaaacaaaaattacatgttcatgataaaaaaaaaaaaagcaatagtgaggaagaataaaaaagtcccctttcccattcctatctccctgtaatttttccttttcatttcaaaatatatgtgttaattttttttagagacagggtctatctatgttgcccagcctggagtgcagtggctattcatattgcaatcatactgcagctttgaacttctagactcaagtgatctcctgcctcagccttctgaatagctgggcttacaggcatgcacgagcactcccggtttatgtattgatttctaaaaaggaaatagatataagtggtaaaaatttcaaaccaaaaaaactcccaccccatctcattcccatcttcagtatcctttcccaagagtaacttctgtaataatttataaacatttcttgcatatatcatcattttatctatatatttggtttcttatttacacaaaagatgggactgtggatcatgaaggtctttaaacaccacaaggagcttagatgtttattatgttggcatcagtgaaccacgtattttaaacagaacaataaaatggtcagtttttaatattatcacatagacttttaaaggggttatagtcctagtgcatagtagcaggtactaaaaaaattgaatgaataaactttaaaaaacatattgtgagtacagcatgaggtcaaggtaaagtaaagactatttctttactgttcacaaacacctaggacctttaggccatttagggacctgggttcacagctaataacactcagaggagggagctatgggatggaagagggtctcagccctggtcaaggtggaaaaggaatagaaataacttggagtgagtacctacagtgcactgggtgcacatcacctcatggaatccttgtacccctatcccaccagttagggattagttccattactagaatgaggaaggtgaggtgcatgacttgactgacttgtccatagccaccagcaaatagtgagctttcagttctctcctacctccactcttatcgtcctccagtttgtctccagacagtagccagagggatcattttaaaacacaaaacaggccgggcgcagtggctcatgcctgtaatcccagcgctttgggaggctgaggtgagtggatcacttgaggtcaggagtttgagaccagcctgggcaacatggcgaaatcccatctctacaaaaaatacaaaaattagccaggtgtagtggggcatgcctgtagtctcaactactcaggaagctgagctgaggtgggaggatggcttgagcctgggaggcagaggttgcagggaggcagaggtttcagtgagctgagatggtgccactgcactccagctggggtgacagagccagaccctgtctcaaacaacaacaataacacacagaacagatggtttcacattcttgcttaaaactctctagtagtgggctgggtgcggtggctcacacctgtaatcccagcactttgggaggctgaggcaggtagatcacctggggtcaggagttcgagaccagcctggccaatatgctgaaaccctgtttctactaaaaatacaaaattactcaggcatggtggcatgtgcctgtaatcacagctactggagaggctgaggcaagagagtcgcttgaacccaggaagcggagggtgcagtgagccaggattgtgccattgcactccagcctgggcaacaagagcgaaactccatctcaaaaacaaacaaaaatagcctctcgagtagtgacctcccatagtccttagggtaaaacccaagcttctccccaggctagtagagccccacatatcttcctttttttttttttttcttttgagacagagtctcactctgtcacccaggctggagtgctgtggcgcgatctcggctcactgcaacctccaccttgtgggttcaagtgactgtcatgcctcagcctcccaagtagctggaattagaggcacacatcaccatgcccagctaatttttgtatttttagtggagccggggtttcaccatgttggccaggctggtctcaaactcctgacctcaagtgatccacccgcctcggccccccagagtgctgggattacaagattgagccactgcgctcagtatgtatctggcctagcttccacccttactactctttccccatgcctgctacaccagagccgcccaggccttggttatttttttttctaatgtgccaagctcattcccactttagggcctttgcatccactgttccctctttccagaacattccacacacatactctttgctctacattatagctggctccttctcatcccttagttttcagcttaaaagtcacttcctgagaggccttccctgatttctgcagctaaggaatcctccctcccctaccaccattattctgtcatttcctcctttttcttcatagcacctgccacaacttgtaattatagactcctttgcttattggctttttcttccagggctctatgaaccacatgagggcaggaactatctgttcccgtcccctggcacctagcatagggctctccatatttaaggaatgagtgagctgataactgaagtgaggttggaaggcagggtccctccactctgtttatgtagctgcctccttgcatggaaggctgggccccaactggggcaggatccgatttccactgagggctggaacccccaccccaccccccaggaagtgttctcagccctgggccctgggtgccaggaaatttggcctaggtatcagggaggggcgggaatccagcctccctgctgcccagctggggaggtccctgtctcttcctagccgggcaccgttgccccgcctgtcctggggtgcacgcgaaaatgaggaaaggtgagtagtgctagccagtgcggggattgtgtggcaggggcggggcagggaaagcgctgaatagtcccacctggagggtgggcagggccagataggagatgcccagaccgaccccggctgcctgcccgcagacccggactccttcctgaagtctgcacggctgcagcggctgccatcgtcgtcgtcggagatgggcagccaagacgggtcgccgctacgcgagacgcgcaaagacccgttctccgccgcagcggccgagtgctcctgccgccaggatgggctcacggtcatcgtcacggcctgtctcaccttcgctaccggtgtcaccgtggcgctggtcatgcagatctacttcggggacccccaggtgagggggacaaatggggagggggaggaaactggggagtggggagtggggtaatgtttgaggaactgtggaaactggggaatggctgagtggtagaaggggagagagggtggtgacttgggagaggaaggtcccaaagagaggagctccagggcatgagggagacagaacaaggaagaataaggacagatccattaggaggcacttggggtaatgagggcagagtcaaggcaacaagggggcagggcttcgaccttcatgccgcgtagagttctagggctagtggaggtgccctagggaggtggacagctcctcctgcccccaccaagtcctctttcccctcccagatcttccagcagggtgccgtggtgaccgatgctgcccgctgcacttcactgggcatcgaggtgctcagtaaacagggatcttctgtggacgcagcggtggcagcagccttgtgtttgggtatcgtggctccacacagttctggcctgggcgggtaaggagcagtggaggtcggggtcccccaggcctacttcttgcctccaggtctgtaggcctcatgtgcagcactcctaacttagggagaggggcttttgggccccaactccttgcattttctctttctacaccaaatttcacccccttctccctggatggagtcagaagagcaaagctaccttatggaaaacctgaaagtgttttcagaagctttttttttttttttttaactagaaaaagaaatttgtaaaccataaattaagatgcacaggtggaggtatactgtcatcaattaaggcagagatatttcaacttctaggatcataaatccctatgggtctgatgaaaagccttgcaccctctgtcctccaaaaatacaccctgcactaagaactcttagaagttacaagctggccacccatgggcaacacccagcacacagactggtttggtttagacactgaactgtcttaaaattttgtttgcttttgttaaaaagttgagaattttcataaaaatccagatttccaacatctcttgaacaatcgggaaatccgataacaacttgggcccgcattctcacatggctgaagttacctggcgtggaatagaagctgcttcccatgatgggcatgcactgtccagtttgccgtagtttctaccacttcctcttctctgtcctgcttgccttagtttgtcatttggctgtgggcatttaagtttgcagcccccatcttagacgtaaataagctacagaaaaggaacaagctgacaaagttcctatcttggctcctgtaagaccagctctccaagccgtaccaaagaaattcctcttttggttttgcatgttctatccttacataatccagtcctgggggaggggcaagggacataccaagtagacaggtgcaggaagctggcaggggtccagctctggtccagggtgggggcatggggcagaacatcctgttctgccagtctctgggcttttcctaatcagggattaaagtctccagtgacaggatagaagaggtccatggaccctgggtctccaaccctcttggttttgctcccatcctcttagggtggctgagtctgtgaatccatgctggggagggagctcagacacctgaccccaaatgaaaaactgagcctacagctctcaccactgggggtggaggggcagcagattcattgtacagaggggtagcatgttatcatcacacttccccttctgtgtctctcccagtgggggcgtgatgctggtacatgacatccgacgaaatgagagccacctaattgatttccgggagtccgcaccaggggccctcagggaagagaccctgcaaagatcctgggagaccaaggtggggaccctggtgagaagagagagttcaggggagtctctcttcattgcccttctgctaacccaagcattaatttgctaagtatttaccaggggagtgggaaaaagagttgagcaggattctcttaggctatgagagagtcaggcagcccccaagataaaataatgaactagaaaatctggaaccttacttctctgggaatcttacctatctggcacgtgggaaggaagaaaaaaggctactgagtaccctgaaatgtcacgaagttgatgcaatgaaactcacacatctcactctgagccagttgactataactttcccagcccttgatatattggaagattagaggggaattgccagaagtaaaccaactgtctgctgaaagaaaaagaagatatcgaataacttggaaaaatgggtacttagtgcggtggcaaaagccaaacacacccctgagtcttcagagctcagagtaatggtggggtgaaactgaataggttaaatgaaggtcctttgtccaccgttttaaaaggtagggttgcctgggcacagtggctcacacctgtaatcccaacactctgggaagccaaggcaggaggattgcttgaggccaggagtttgagaccagcctgagtgacatagtgagactttgtctctacaaaaaatgctttgaaattagccaggcacagtagcatgcaccaaggatcgcttgacttgagcccaggagttggaggccacagtgagctatgactatgccactgtactccagcctgggtaacaggaaaaaaaaaaaaaaaaaaaaaaaaaggcaggggttggtgaaatccaatgtagacaggtgtctttctacactggttatgtcctggctcttaaaagagttttgcttaatttataaatcccccaactacggcagctaaaagaggcctttctgcatttgctgataggaagtcagggagatgggaggggtgcctgcttgggaaagcttgtccctcccctgggatacttggcctgtgtctctcccctgtgccagccatccctggcttggggctctgcggagttcagcccagcaccccccttccagtgacctggtctcctctctccctcgcctacccgccttgcccagcctgggctcttggtgggggttcccggaatggtgaaggggctacatgaagctcaccagctctatggcaggtaacaaccctccccctggggaccagggacccccgtttgcatctctccttgggtggccttctcctacttccctggattcttcctttcccaactccccctcctaatatccccttcccttgccaggactctccttcccaggaacccccctccccccggacccctcctcattcccccaggacctcctccaccccctgctctccggcccccccaggctgccatggtcccaagtcctggcctttgcagcagctgtggcccaagatggcttcaacgtgactcatgatctaggtcagtggggcctggggatttgggagagacatgaggttgatggagaagggtagaatctttgagatttggagcccaagccagagaggccctctcttccagtttgctcctcagaccccctccccaccttatcccaccctcacctggaggcggcctcaaacgagggggtctgggaagggcccttagacatccctgcctcgcacttaacaggctcctgggggtcagggcacttagggtgggccactcagcccccatctaccccatctattgcgcgtctcatccggtccagtcctggcgtcccgccctgcccagcctcccgtccctgcccctagcccgtgccctggctgaacagctgccacccaacatgtccgagcgcttccgggagacgttcctgccatcgggccgcccgccactacctggctcgttgctgcatcggcccgacctggctgaggtgctggatgtacttggcacctccggcccggctgccttctacgcaggtggcaacctcacactggagatggtggccgaggtaagtgctcgtgttgtgcgggtgggggcatgccccaaggtccctattgcaggacatccgcgtccgcattttttccttccttccctccctccctccctttctttctatattatttactgtggattatgttcatttgaaattctagaatagtcaaaactaacctctagtgacagaaatcagatcagtggttggtggggctgggaggagctgactgggatatgacatgaaaaacctcctgggatgatggaagtgttgtcttttttttttttttatgagacggagtcctgctgtgtcaccctggctggagtgcagtggtgcgatcttggctcactgcaacctccgcctcccaggttcaagtgagtctcctgcctcagcctcccgagtaactgggattacaggtgtgcaccaccacacccagctaattttgtatttttagtagagatgaggtttcaccatgttggccaggctggtctcgaactcctgacctcaagagatccacctgtcctggcctcccaaagtgctgggattacaggtgtgagcccccatgcctagccagaagtgttctgtcttgattcagaggtacctttgggcttctcaggggtgatgccagcctgtgcaggggcttgtcatgtccctcccaggcctggtggagacccagtatcggcctcagcttccctaagctcacaatccttccctgcttttgggttttctagggactgagggaagcacctctttcattgttgagtatcaagactggggagattgacacagaagtttaccatccaatcccaaagagtcccagtctcaggcagtaacagatgtgagaactgtcattaatagtgcaaaagtcctaatggaaaattaagttcatggtaaggatgcatagaccaactcagtggttctctcatctgagcaatggggatgattatatctgtctctgccatacagttgtgggaattaaataggtctgttattcattcaacattcacagagtgcctgctctgtgccaagccctatgctgggcactggatgtggcgatagactcaaacagacttaactggaaagtccaggagattactggctttagattcttctgtgtccagattatcaatccactgtgttaggatttgctctccctctttctctttctctctctctcaactctactttcctttgtttggattcactctcagatcctttccacctgctccccaccagcccatatcaggccatccttccagcaagctatcccagagaaagagcatttttccttcccagtagttccagcaaaagcctccaggttgtgtcttattagctcatcataggtttcatgactattcccaaatcaatcactgtggcacagaagggaatgccccaattggccaggcctgggttgtgtgccctttcctggaggtggcaaagggaatgcaggagattgtaacaaagaccatcagatctttgataaaaagaaacccaaagttgagtttattaacttgccagaaaaaggaactcaagaattcaaatgggccaggccatggtggctcatgcctgtaatccccactttgggaggccaagatgggtggatcacttgagctcaggagtttgagaccagcctgggcaacatagtgagaccccatctctacaaaacatacaaacattagccaggtgtggtggcatgtgcctgtagtcccagctactcaggaggctgaggcaggaggatcatctgagcctgggaaggttgaggctacagtgagccatgatcgtgccactgcattccagcctgggcgacagaatgagaccctgcctcaaaaaaaaaaaaaaaaaaaatcaatgtgtaattctctgaagatagataactcaagggtttcaagtactataaggtacaaaaaaggaaaggattcagagtggttatgctaatttagggttgacagcacactggataggatggaatgagcccattggtttgtacaagattggttcattggtcaataatgagggcttggttatgtccaataagggtcagtccttctaggatcactcaaagtcatggttttctagtggctttagttggttgtggtgagatgcagcattcagttttggtatctcctaggcaagtgtgccataagtagaaaaccttccttttacataggcagagagagcagcaggtacaaagacacgaaggcatgagttcaggaactgcaggtcactctgcagctgcatagagctcactggggaacagcaggacatgaggtgggaggggtaggctggggccagatcacaaaaagtcttgaatggcaagctaaggaggtcattcatggaatgtacccagtgtgatgcctggcacatgataggtgctcaatgttagtgcttttcccccttcctttttcctgaggtgtctagggataatggggtctctaaaggccacgatgggggttgcagaaggcacagaagttataaacagctgatctgtctgtgatccaaacgtgttataggccaaaaccaccatgtcacagtggtgggaggtcattccctcattctcttccctccaggctcagcacgcagggggtgtcataaccgaagaggacttcagcaattacagcgcccttgtggagaagcctgtgtgtggcgtgtacagaggtgacctctcccccggctcccagggtcccccctcaggagaagcctcccagtccatggccacatcgttttggcctagagactcctctccatttcacaggagagaaactaaggcagtgagctacctgggcagtcaactgttgaagcaaaccagagtcagcccaccttctgaaaagtagctgtggggtcagttaccccaagtatttaggatattggggggtggacctggtcaaagggtccaacctggaagttggggttctggccataggttttcttgatttgggctctgtgttgcctctgccctttccccagcagcgctgtcactgccctgtacttcctaagaatttttaagacaaagtccatccaagcttcacagtagaatgaacctttcaagacagtcatagacccagctcctcatagtgccaaaaagaaattgaggcccgaggagggaatataacaactggccaaactcaagaaaaccaacagggaacccagaaaaccaagcttatgacatgggtggggtccatgtttactgaacccaaggtggtaggtgctggatttctcagaagattctcaggttctttcccttctaggagagccagatcacatcaagccccaggaaagggtttctctgagttcaactttccaggcctcaatctccaacctgattcctctgccagaggcagtggaatatgaagcaatggaaagagcctatcagctgggtgcagtggctcaggcctataaccccagcacattgggaggctgaggcaggaggatcacttgagcccaggagttcatgaccagcctgggcaacatagtgagacaccgtctctataaaaaatttaaaaattacccaggcgtggtggtgtacctatagtcctagctactcaggaggttgagatgggaggattgcttgagcctgggaggtcaaggctgcagtaagcatgattgtgccactgcactacagcctgggtgacagagtgagaccattatcacacacacacacacacacacacacagaaaagaaaaaagaacaagcgtagcgttggagctaggaagacctgggtttgagtaccaactgtgccatttaccttgaacaagctacttcccactctgagccttggttccctccttaaaatggaaataataatagtgcctacatcttaggatgcccataaggatttgatgagatgatgtaggaagttgccctgatcagagcatgcactgaatatagattttccatttccccttcccagcctgggttgtctcaacaatgctagtaccttgagtgctctggattccccttgtctctctgtaccacagtttctggacctatcaaatatgtgtgataacagtagccacagtgaggactaaatgagttaatgttagtgttatgcatcagctattattcctttgatgtccaaacatctagtaacagaataggaagagaaggttgctgctgccaagaagtttggggctggatgagaccatcaggagtcatggataatatcctggcctatgggagagctaaaaggagacacatgacaggccaggaatatgaacatctggtcacctgtttctgctgtgctctgctgatagcctgcagtgtgactctgggcaagccacagccctcttgagccttagttttctcaaatggcagaggaaactgaagaccagtgttctgagttcaagtcctggccctgcccttgacttgccatgtgaacttgaatgagtctctttgcctctcaatgtttcagtttccccatctggtgagggagttcagcgcagtggtctcagtgtgtgatggtggaatgtggagatgggatgtgggatgtgaaggtgccttgacccctaccctgccatcagtcacttcctgtcctttcaggccacctggttcttagtcccccacctccgcacacgggccctgccctcatcagtgctctcaacatcctggagggcttcaatctcaccagcctggtatcccgagaacaggctcttcactgggtggcagaggtaaggctgacccgtctgcctttccctggatttaaggatattaggagtggggagattgggtactgccatagggcaggactaaatcccctccaagttttctcacacacgaaagtccactgggtgtgggttctgggaggggcctggcagcctcttccatatccctgctgtattttcagaccctgaagattgcattagccctggccagcagactgggagatcccgtctatgattctaccatcactgagagcatggatgacatgctcaggtgggtcttgggcaggacctgggggctacagaggcagcggtgggtgtggggaaagggtcaggagaaaagcagctggtatagcaataaaggcctgaaatcctaagtcaatttcagctcaaccccaactcacaacgtgacactgggtgcctctccctgcacctcacctttcctatcagcacaatgagttggcttacttcatgtggctcttaaatttttttgaggctagcatagcacctatataagcccatctgctcctccttttgagtaggaaaagaaagctcaataccaaacaaaagccaggcacggtggctcacgcctgtaatcccagtactttgggaggccaaggcgggtggatcacctgaggtcaagagtttgagaccagcctgaccaacatagtgaaaccctgcctctactaaaaatacaaaaattagccgggcgtggtggcgcgtgcctgtagtcccagctagtcaggaggctgaggcaggagaatcacttgaacccgggaagcagaggttgcagtgagccgagatcatgccactgcactccagcctgggtgacagagtgagactttgtctccaaaaacaaacaaacaaacagtctccaagcaaatactgaaggtggtggtaatacagcttcattagcaacataacatagtagtagcttgtgggctctggtgagactgccttcattcaaattccagcttgacccttcgctagctgtgcagccttgggcaagtggtttaaactctctaaatctgtttctacaagggggcttgacaataatggtatcaaccttgtaaggttgtggtaaggactaaacaaaatcatacatgtaaagctttgtttggttgaaaattgaataaatgtcttcaagtaatctttggtaacttattctctaatcagctatggataatccaacacatagttattaggtaagaaaccctcagttgaattttttttttttttttttgagatggagtctcgctctgtcgcccaggctggagtgcagtgtcatgatcttggctcactgtaacctctgcctcccaggttcaagcaattctcctgcttcagcctcccgcctcagttgaatttttaaaagtctggagcattacatattgtttctaaggtcaatgcaaactttgctctaaaacacacacacacacacacacacacacacacacacacacacacctatatgaaatctattcaaccagttcatccagtaaatagttattgagcacttactctgtgccttgggaaaaaactctaaaagaaagtaaagatcctgactggatgtggtggctcatgcctgtaatcccagcactttgggaggccgaggtgagtggatcatttgaggtcaggagttcaagaccggcctggccaacatggtgaaaccccgtctctactaaaaaaaattagctaggtgtggtggcaggtgcctgtaatcccagataatcgggaggctgaggcaggagaatcacttgaacctgggaggcagaggttgcagtgagctgagacagcgtcactgcactccagcctgtgtgacagagaaaaactctatctcattaggaagaaaaaaaaaatcctcatatacaaaatcctcccccaactaaactcttaataaaactttagactacaaacattagtttaaatgaatccagtttgttaattcaaagcaaatattttctgatccattatgcaccaggcactttcatagaaaggattaagaagtcagataactaaaaggctcttgatttaaacattaaataaaagttggttccagaaaagaatctaaataatacctaaatacattcaacagctattttctgggtatttcttatgtgcaattaatgagcttctgcactcatagacctagtagtccagtgagggaggtagatttcatcaaataattacacaaacaccacaaaagtgaggtaggtggggtgtattgagagcctgttgtttgctcatctcccaccccttgtcttttcagcaaggtggaggccgcctacctccggggccatatcaatgactcccaggcagcccctgccccactcctgcctgtctatgaactagacggagctcccacggctgcccaggtgctgatcatgggacctgatgacttcattgtggccatggttaggtatgccagctcagactcagaacctggaacaagggatcctctgaaccaagagggggtgggggctgggtagaggtgaggatgggccagggctcacccaaccccacctcggcccccagctccctgaaccagccctttggcagcggccttatcaccccctcggggatcctgctcaacagccagatgctggacttctcctggcccaaccggacagctaaccactctgcacccagcctggtaggatttgcttccctgctttcctggggaccctgaggcctataggtaggaggtgcaatggcatggctgcccctttctccctactttctccagaatcttctagtataaggaagcctaaagaagaggttcacctcatccctagccctgctaagtctgggacatggagcctggtgggtctgaagaacccttgtcccattctgtcactgtcttactgtgtgaccttgtgaagatcttgccctctctgggcaatttcttcacctgtacaatgagggttttggctcctatttgatgttttgggcattttccagcactagcggtctgtgactatgtgagcttgagctgatggggctcagccctatggttgggcaccaaagagggacccaaggaggaaggatttaataatttttatctagttaaaaatcagcactcttacaccccgccatctggggccccagcagggcaaagacacatagagatgatcagggtggggttatcctgttcttccccattgccatctttcttggcttggtcctttctcctgtgacccgtagcagcctcatagctcagtggatgtacttatcactcccccatccaccccacccatccaggcaccctacccatttcacagatagcaaactgttgtctgggaagggaccagtctcccaggaaaactgggcctgtggaagatgtagaagagggagagcagttggaagggttgtggaggggccctttcccggtcttgtcccaccccacctgccccttgtggtctctgtcctctaacaacaggagaattcagtgcagccagggaagcggccactctctttcctgctgcccacagtggtccgacccgcggaggggctctgtggaacctacctcgctctgggggccaatggagctgcgcggggcctcagcggcctgacacaggtgaggtttacgccatggttggcctttttcagccgggagccaagctgtggcctagactgcagatgcctgtcatatctgtggcttgtttccattcctcatgcggcaaacatgggctgaggctgttttgtgccaggcgcatcctgggcaatgtggacatgggctgcgctgagtttcttagtgaaaatggagccctgatgctccctgtctttcccggttgcaggggaaatggcagggtcagtagattgaaaagtggggttagcatctgggtggcctgggttctgttaacctcaagtcccattatacctctacccagcatctgaatagacaaccagccctctttagggtgggatttgaaaggaagggcctgcttttctccagaacacctcagaatggctccatgaatgtcttgagaacctgatatatatgccaggcacctattttggcaggtggtgagttaacgatcttaagttctggaatcagacactcctgggttccggcccaagtgctaccaatttgtaactgtgtgatgctggagcattcacttaacagctctgaacctcagtctcttcatctttaaaatggaaataataacaatagctaacatttaaagagttcgtactaagtgctgggcactgtgttatgtgtgttaaccattttaaccttcccagttctggagagaatccttatttctattttatagataaggaaaccgaagcccagagaggttaagactttaggtcaagtaccttcagctagaaagagcagggaggcagtttggttccagagcctacgcacactcctaaccactaagttaaaagcacccacattgtgccctagaccactcctagctattaaccttgccctatccagagagaaaagaagggagccccgggctagattaaagagacttggttctagtggtgtatcttccctggcttcctctaaactctggagtaagtcattttccttgctggacttcactttccctctctgtgaaatggaaacagtcatcacaggcctgcctgtcttccagggctgttaggaggctcagatgacacccggtgtaagaattctcaagactaaggagcctggaccaagggtgagagctgaggaatcctggaccatcacccctgggacagccctgatttttctgtaccttggctaccacaggttctgctgaatgtcctgaccttgaaccggaacctgagtgacagcctggcccgcggccgcctacacccggacctgcagtccaacctcctgcaggtggacagtgagtgcagagcagagacctcgtggggcgggcacagggacaggtagagaaaggactcctcccaagggtgcccatgcctcaaccagcaccaactgccagtgaagtttggttttatttggcaaatttctattggagcagtgaacgatctggggattggaaccagtcttgccatttcctggttgtgtggccttgggaaatccatgtctcaactctgagcctcagttttctcatttgtaaaataagacacagttgttcattcttcaaactttcatttactcaacagtttgtattgaacacgtacgtgttccaggcatcatcctaggtgctggggattctgcatttacaggcaaacaagaaaataagtcatcaaagaaatatgagacaaataaatgctctgccaactgtcaaagcagggtgatataataggacggactcaatgatcaaggaagacttctctttggtggcatttaagctgagatctaaagagtgagaaagaaactgggtgcaatggctcagacctataatcccaggctgaggtgagaggatcgcttgaggccaagagttcaagagcagcctcagtaacatagtgagacccccctccacccccccgtctctataaaaaaatttttttaaattagccaggcatggcacgtgcctgtggttctagctactcgggaggctgaggcaggagaattgcttgaaccagggaggcagaggttacagtgagccaagatcacgccactgccctacagcctgggtaacagagtgagatcctatctcctaaaaaaaaaaaaaaaaagtaagagagagcccactatacaaagaattggtgcagagctttgtaggtcaggggagcaagtacaaagaactcagggcaggagtgggtttggtgagtttgaggactaaaaaggagaccaaggtaagcaaggatgaaattagatcagagaggcaggcaggcgccggatcgtggaccttagggtgaggagacggactttcctctaagaaaagggcttaattttggcacagctgaattttataaacaggaaagtatctgcacctttgaggagtttttattataacagacaatgtattaatatgacacgagtccaaaagaatacagaattgattgagacacagtccttgcctgttcaatattattatccccattctatagaggaagaaactgaggctcacagaagttataaactagtcaaagatcaaccactaagtggcagaacttcaattaggacacacacctggctgataccaaagactctattctttactgcacagctcttgatatctcctggactgaatcacattagaagcagagaccgcgatcttcaacaatcacatcctgtggttggccagcgacacttggatcccagctgatagatgacaaggccacatccttgaaattgaattttgttcaacaaatatctgctggtctctgttgaatgtgaggctctgtgctaagttatttgggctcagcccagtcctgccttcagggccttagtgtaagatggaggtacaaggagtgggggcttggtgaagggaaagttcatctacctgaggccctggggaggctttatggaggaggtgacaagtagcttggctttgaagtatgagtaggaatttggtatgtggaggtaaaggacattctggacaggaggaacagcctaggcaaaaaccagaatgaatggctcagagagcagccaggaggctagctgttgtttcctagagttctcaatttacccagcacctttgtgacttttgccacatttgcacaccatctaaaccaatatgtacataacatgtctctctaaatgaacttcctttttagcctaaatgtattttattatttttttgagatagagtctcactctgtcacccaggctggagtgcagtggtgcgatctcagctcacttcaacctccacctcctgggttcaagtgattctcgtgcctcagcctcccgagtagctgagaatacaggtgcacatgccaccacacccagctaatttttgcatttttgtagagacagggtttcaccatgctggccaggctagtctcaaactcctgacctcaagtaatccgcctgcctcggcctcccgaagtgctggatttacaggcgtgagccaccatgcccggccctaaatgtattttaaaaatagaccttatatcataatcacaaatggaaaaatgacatcatttgccacaaatagatgacaaatagctatcatctatttgttagctatacaaatagatatgtgtagtttttagttaaatattgttgcccatggaaggctctgagactgctttctccattaaagaaggagattaggaagcgttagagagcagactgaaacttgttccttgccataatcaaaaggattgaaagtgaaccacaaaggaaatagattttcgattaagtgatttaatgctattcaagattgggtcttcatctcaagagctaccaaaagtcttcctattagggaaagaagaagactagatctttattgagaagcggtaggatgtggagttacagggcttctcacagaggtcagccttaagattatccagttgggaaggggagacacatgacctgatttgtcttatttaggggaggtagattgaggggaggagaatttaagtcagggaaatatgagaagcagctgggatatggcccaggcaagagatgatgagggtctgaacttatccaatgggatggggatttgttcatctatgtagtaagtatctgctcaatatttactatgtactgaccctgtcactggagatcaatagcaaacaagacaacgttcctaacttcaaaaagcttataatctagtggagggagacacagtaaataaataaacaaatacaggtagcagtaagtactttggaagaaaaccaaacaaggtaaagatggtagggactgctgttttaggtaatggtggaggaaattcttgaagaggtgccaaagactggatagcagtaagggggccagcagtgtgactttctaggagagcattccaggcagaaagaacagtaagtgcaaaggcactgaagtagaaacatgtttggccttctaaagggacagcaaggaggtcaatgtggctggaatacagttaagcaaggtgagaaatagaaggaaatgaggggaggaatttagagaagtagcaaggtcccaagcaatgttgggcttagaggcaccttggtaaggactttggattttattctaaattccgttgaagctgttggagggctttgagcaggggaggtgacaaggtctgactaatggtttaaaaggatccccttggctgctgtttgaacaggctataagaaaggcagggggccaggcgcggtggctcacgcctgtaatcctagcactttgggaggctgaggtgggcagatcacctgaggtcaggagttcgagaccagcctgaccaacatggataaacccccacctctacaaaaaaaaaaaatagaaaattagccgggtgtggtggcgcaagcctgttatcccagctactggggaggctgaggcaggagaatcgcttgaacctgggaggcagaggttgaggtgagccaaaatcgtgccattgcactccagcctgggcaacaagagtgagactccgcctcaaaaaaaagaaagaaagaaagaaaggaagggagggagggagggagggctggaagcagggagaccagtaaggaaggaaggaagggagggctggaagcagggagaccagttagtggattatgcagaaatcctggcaagtaatgatggcagcttgactttggcaggtggagatgaagacccacaaagcccctttttcttttttctgcctccctccctccctcccttccttccttccattttctttcttttctttttttggagacagggttttgctcttttgcccagactggagtgcagtggtgcaatctcagcttactttactgcaacttgtgcctcccagggtcaagcgatcctcctaccttagcctcctgagtatctgggactacaggcatgtaccaccacgctcagctaatttttaaattttctgtagagatggggtctccctatattgcccaagctagtctcaaactcctgggctcaagtgatcctcccaccttagcctcccaaagtgctgggattacaggcatgagccactgcacccggcctgtcctgttttcaatattaagaatgactgcatattattgatcacttactgtatgcaaggttcagtgctgtgtgtgcattatctcctttagtccctgcaacttcatgttctcatataatccctatttatgcatgaggaaactgaggctcagcaaggtaaagtgatttgtccaaggtcatacagctctgtggtggagcagccaggatgaggactcaggtctgactgtaggactcttgaactagtgctctgtacattctgaatgtgtatatgtcggggatggttttcaggtgagttcacagaggaagagattgagttcctggaagccaggggtcaccacgtggagaaagtagatgtcttatcctgggtccatggcagccgaaggaccaacaacttcatcatcgctgttaaggaccctcggagcccagatgcagctggagccaccatcctgtagagcagcggggtggggcggggtctctgctcccccactttgcatgttcccagagtccctccttctcccaggtttggtctcagggggaccccagggatgccccagatcaggggccagaggggatgcttagcaaacccaatcccagagtaactggaaaattctccatcaggaggcctgtggtggtggtggtggtggtggtggtggtggtggtggtggtgagtgtcagcatctacagtacagccaggcaggcaggaccttgaggaatcagactatctgtctgtgtgtcacctctcctccttcagccatgctggccccgagcttagggatgtgcttgcaaacccttctcaagggtctcacaaccccaacatcttcagactggcctgacctgggccttgtcttccagttcctttctcccattcccagcctcatttcttaaatgactaggaattttttaatggaccatcatagggagggggtgctcctcttttcccaccaggttgaggtgggggccttgcatcgggggtccccagggtatggggtaggggtgggggtgggcaccagctcaggggcttccatttgcaaagggaaattaaagaaagaatgttgcttaaccatggctctggtttaatttatatttaactgggttgagagtgggagtgggagaggagacctcggctcaccctgtcccagtaaccgattcaagagtaacctggagtcaacgttgaaggactcataataatatctgtccagctaagacatgcaccaataataataattcataacaccaataactataatatatagcatctaatctttattacaagcctcatgaagtaggtactaatattattgccattttacagatgggaaacaggccaaaagaggttaagggacttgtctaaggttcttcatctattaaatggaagaactggggttcatctcagcatgtccaactctggaatttgtgctcttaaccaattccacacctattagttgaactctttgttataaagtatacgtcatatagtatatatcagacaataaataccttttatagataatatcattcatgcatacattcttctatccattacattccaggtactttgttaggcactagagattcagcactgaacaagacaggcttttcttttcttttttttttttttttgagacagttttgctcttgtcacccaggctggagtgcaatgacgtgatctcagctcaccgcaacctccacctccccagttcaagcgattctcctgcctcagcttcctgagtagctgggattacaggcgtgcaccaccacacctggctaattttgtatttttagtagagacagggtttctccatattggtcaggctggtcttgaactcccgacctcaggtgatccgcccacctcagcctcccaaagtgctgggattacaggcatgagccaccgcgcctagccaagacagactttttaatgggtttgcagtctatcggggcagtcaaatgttaaagaaataagagcacagataattcgggtaattgccatcacaataaactctatgagggatactaagagaatgtatatcaagaaagttaatctagtttgaggatccgcaaaagcttccctgagaaggtcatgagaatgaataggattgacaggaaaggattagatatgggatgtgggaatgtcattctaggcaaagggaacagtatgttcaaaggtattgtggtgagaaggaatgtgtcatgttttaggaggtgaaagaaggcctatatattcttcctagagcaggggttggcagagttttcctacaaaggaccagagagtaaatatttcagattttgtaggtcatatggttcctgtagtaattactcaactttgttgctgaagtgcaaaagcagccatagacaatgtgtaagacaacatcctgatggctgtggatgtgttccaatagaactttcttttctttttttttttttttttttttttgagacagagtctcgctctgttgcccaggctggagtgcagtggcgcgatctgcaagctctgcctgcaagtggagctcactgcaagctccgcctcccaggttcacgccattctcctgcctcagcctcccgagtagctgggactacaggagcccaccacgcccagctaatttttttttttgtatttttttttaatagagacagggtttcaccgtgtagccaggatggtcttcatattctgacctcgtgatccgcccacctcggcctcccaaaatgctgggactacaggcgtgagccaccgcgccccgccagaactttattttctgaaaacagaccccttcacgcctgtaatcccagcactttgggaggcacgaggcgggcggatcacgaggtcaggagatcgagaccatcctggctaacacagtgaaaccctgtctctactaaaagtacaaaaatttagccgggcgtggcggcgggcgcctgtagtcccagctattcgggaggctgaggcaggagaatggcgtgaacccgggaggcggagcttgcagtgagccgagattgcgccactgcactccagcctgggtgacagagcgagactccgtctcaagaacaaacaaacaaacaaacaaaaaccagacccttactgctataagggcagtagtgtgctgacccctacactagagcaccccgaggggatgatgagatgagatgaaactggtgagataggtagctcattcttatgaggctggtattaattcccccattttattgatgagaaaattgagagacccgaagcaacttaccagagatcacccagctggtagttggcagatgcataattcaaaagcaatctgtttgactccatagactatgtctctttctttctttctttttcttttcctttccttccttcctacctttctcttttcttcttttctcccttccttcccctcctttcacagatccatgattcaaaagccatctgttcgactccatagactatgtttcccttcccttccctctcctcccctcctctcccctctccttgctctctccttcccctctccttcccctccccttcccttcccctctgtctcactgtctctcttttgctttccttctttctctttcttccttccttccctccctttctttccccttctttcccttcccttccctccccttcgtttctttatctttttttttagagatagggtcttactctgccatccaggctggagtgcagtgttgcaatccctgttcactgtagcctcaactttcctggtcaagcaatcctcctgcctcggactcccaagtagctgggactacaggcgcataccaccacacctggctaatttttcatttttttgtagaaacaagagtctcactatgttgcccaggctgatcttgaactcctggcctcaagtgattctcctgccttggcctcccaaagtgctgggattacaggcttcagccactgtgcctggccacttctttaaaaatttttaaattattttattggattgcagatataacagtttttcaaatatcaaatactttatagatatataatgtatatctgtaatccaccccttcaaaatccaaaccctccaaaaatctcattgtcaataatttaatacacattcctccaacttttttctgtacactaacatatattctgtttaaaaagtaaaaatgggactatattttcacactgtctacaacttccttttttttttaacttaccaatagagcgtgggcattttcccctgttaatatatatggatccacttcattatttataataatgcatcgtagttcactgaagggtttaaccagtttccttttgatggatgtttgggtgatccttgccctgatatctttaggtgcctgagccatgcctgtagtcatacctactctcccaggctgtctttcaagtgacagagtgtcttagttcatttgggctgccataccaaaatatcataaactgggtagattggagcagagattagtgaaatagagaatagaaaaacaatagagaaaatcaataaaaccaaatcctggctctttgaaaaaatcaacaaaattgacaaacctgtcccagattgatcaagaaaaaaagaagactcgaaattactagaatcagaaattaaagatgggacagtacttacaatcttacagaaataaaaaaggatcacaaagaaatactatgaacaactgtatgttaataaatcagataacttagatgaaacataaaatttcctagaaagacacataccaaaactgactcaagaagaaatagacaatctgaggagatacataacaaataaagagattagtaatatatactaaaaagcaaactacttacaaagaaaagcccaggtctcagacggcctcactagtgatttctacaaaacattgaaaaaaattaataccaattctataaaaaaagctttcaataaatagaagaggaagaaacgctttctagtttattctgtgaggctagttttaccttgaaattaaaatccaacaaaataagacctaataagaaaactacagaccaatattcttttatgaacatggatgtaacatactcaacaaaatactagccaacaacatataaaaagaagtatacactgcctcagtgggatacattccaggaattcaagcttggtttactttcaaaaatcaagtattgcattatatttttttggtagaataaaaaacaacacatgatcatctcaatagatgcagaaaaggcatctgacaaaatcctaccaccccttcatgataacaaacaaacaaaaaacactcagcaaaccaggaatagaagggaacttcttcaacatgataaaaggcaaatataaaaaaccctcagttaacatcatacttaatagttaaagattggatgctttcccactaagattagagcatacccattcttgctacttctattcaatattgtattggatgttctagtcagggcaattaggcaagatacagaagtaaaaggcctccagattggaaagtaaaaagtaaaactatttttatttgcagatggcatgatcttgtatacaaaaaatcctaagaaatcaatgaaaacaatgacagctaacaaaggagttcagcaagattgctaatacaagatcagtataaagtttctgtacacttgcaataaacaacctgtaaatgaaattaagaaaacaattctggccaggcacagtggctcccacctggaattgcaacactttgggagactgaggctggaggattgctggagcctaggagttggagaccagcctgggcaacatggtgaaactttgtctctacaaaaattaactgacagtggtggtgtgtgcctatagtcccagctcctcgggaggctgaggtgggagaatagcttgaggccagaaggtggattgatggcgccgctgcactccagcctaggtgatagagtgagacccttaaaaaaaaaaaaagaaaagaaaaagaaaaaagaaagaaaacaattccatttactgaagcatcagaaagaataaaatacttaggaataaattttataaaagaagtataaaaattaaaactataaaacattgtcgaaagaaatgaaagaagacctaaataaatgtaaagacattctgtgtttatgaatcgaaagatttaattttgttaagatgacaatacttcccaattgatctacagattcaatgcaatctgtatggaaattccagcagcactttattgcagaaatgaatatggatgatcctaaaattcatatggaattaattgcaagggactcagaatagccaaaacaatcttgaaaaagaacaatgttggaggacacacatttcccgattttaaaacttactacaaagtaatcaaaacagtgtggtaggtataaggataaacatatcaatggaacataattgatagtccagaaataaatcaatatatctatggccaattgatctcaactagggtgccaagatcattcaatgaagaaggaatattctctttaacatattcacatacacaaaatgaagtttgaaccttgcctcacaccacatacaaaaagtaactcaaaatggatcaaagacacaaatataagagctaaaactataaaactcttagaaggaaacataggggtaaatcctcataccttggatttggcaaatggtttcttagatgtggcaccgaaagcacagcaacaaaagcaaacatagataattggatgtcattgaaattaaaaagttttgtacataaaaggacaatcttgagtgaaaagacagtccaaaaaatgtgaaaagtatttgcaatcttatatctgatctgagtactttatatagtacccagaatatattaaaaacacttcaacaacataaagacaaacaactcaattaaaatatgggcaaaggacttcaatagacatttcttggcagggttcagtggctcatgcctgtaatcccaatactttaggaggccaaggtgggcagatcgcttgagtccaggagttcaagacaagcctgggcaaaatggtgaaaccctgtatataccaaaaatataaaaaattagctgggtgctgtggcacgtgcctgtagtcccagctactggggaggctgaggcaggaagatcccttgaacccaggagatcgaggctgcactgagttgagatcgtgccattgtactccagcctgggtgacaggagtgaaaccctgcctcaaaacaaaacaaaacaaaaaggacactttttttttttttctgagacagagtctcactctgtcacccaggatggagtgcagtggcaccatctcggctcactgcaacctccacctcccaggctcaagagattctcccacctcagccccctgagtagctgggactacaggtgcatgtcaccacacccagctaatttttgtattttttgtagagatggggttttgccatgcagcctaggctggtctggaactcttggactcaagcaatcctcccatcttggcctcccaaagtgctgggattacaggtgtaagtcactgtgcctgggcttcaacagacatttcttcaaagataagtctatgataagatgctgaatatcataatcactagggaaatgtagattaaaacaggtcaaaatcaccatgagataccacttcacaacaattagactggccataaatattatttttatttgtttatttacttaaatgttattttttatcttttatttaaatagagatggagtcttactatgtggctcaggttggtctcaaactcctggcctcaagcaatcctcctgcctcagcctcccaaagtgttgggattacaggtgtgagccactgtgcgcccacaacaataattttttaaaaaggaaataacaaatgttgctcaggatgtgaaaaagtggaatcttcatacgttgttggtggaaatgtaaaatggtacagcagctatggaaaacagtttggcatttctttaataagacaaaccaaattaccatacgacccagcaataccattcccaggcataaaccccaaatcactgaaaacaggtgttcaaagaaaaacttgtacatgaatgttcatagcatcactattcacaataccaaaaggtaaaaaacaacccaaatgtccatcaacagacaaaaagataacaaaatgtggtatattcacataataatacatattatgttattcagctatgaaaaagaataaagtactgatactgatacatgctacaatatggatgaaccttgaaaacattgtgccaagtgagagaagccaaaaggtcacatattgtatgattccatttatatgaagtatccataataggcaaactgacagagacaaagtcaattagtgattccttagggctgagggaatgggggggttggggagagggagatacctaaagattatagagtttcttctgaggcaatgaaaatgttctaaaattgactgtggtgatggttgcacatatctgtgactacactaaataccatagaattatactttttttttttttttttttgagacagggtctggctttgtagcccaggctggagcacaatagtgcagtcttggctcactgcaaactccgcctcctgggctcaagtgatcctcccacctcagtctccacaatagctgggactgcaggtataaagcaccacgtccggctaatttttgtattttgggtagaaatggggtttcaccatgtcacccagcctggtctcgaactcctggacatatgtgagcgaaccgattcaacctcccaaagtgctgggatcataggcttgagccacacacccggctgaataatacactttaaatgagtaaattgtatagtatgtcaattatatctcaaaagctgtttttttgttttgttttggaaaattgttttttgtttgtttttgatttttgttttgagacagagtttcactcttgtcacccaggctggaatggaatggcgggatctctgctaactgttacctccacctcccaggttcaagcaattctcctccctcaatctcccgagtagctgggattataggcacccgccaccacgcccagctaatttttgtatttttagtagagatggggtttcaccatgttggccaggctggtctcaaactcctgacctcaggtgatccacccgcctcagcctccaaaggtgcttgaattacaagcatgagccaccgtgcccagcctgtcaataaaactgttttaaaaagacataggatttggtaatatgagctaagagctgaatgcaaactctatgacccagcaatcctagtcctaggtttttatccagcaaaaaattgtacacatgttcatccaaagacatgcacaagaatgttcatagtagtaaaatttaaaataactccggcccgggtgcggtggctcacgcctgtaatcccagcactttgggaggccgaggtgggcggatcacttgaggtcgggagtttgagaccagcctgaccaccatggagaaaccctgtctctactaaaaatataaaaaattagccgggcatggtggtgggcacctgtgatcccagctactcaggaggctgaggtaggagaatcgtttgaacccaggaggtagaggttgcagtgagccgagatcacgccattgcattccagcctgggcaacaagagcgaaactctgtctcaaaacaaaacaaaaaaagctctggccaggcgtgatggctcacgcctgtaatcctagcactttgggaggccgaggcaggcagattgcctgagctcaggagttcgagaccagcctgggcaacacagtgaaaccctgtctctactaaaaaatacaaaagaaattaaccgggcatggtggcgtgcacctgtagtcctagctactcgggaggctgaggccagagaattgcttgaaccagggatgcgaaggttgcagtgagccgagatcgcactactgcaccccagcctgggtgacagagcaagagtccatctctaaaaaaaataaataaaataaaataaaatagctcctaagtggaaacccacatgctcattaacagtagaatggataaattatggtgtattcaaacaataaaatgctggccaggtgtggtggctcacatctgtaatcccagcactctgggtggcagaggtgggaggatcacttgagcccaggagtttgagaccaacctgggcaacatggtgaaaccccgtctctacaaaaaatacaaaaattagcatggtgtagtggcatgcacctgtggtcctagctactagggaggctgaggcagaaggattacttgagcctgggaggtcaaggctgcagtgacctgtgatcccaccactgcactccaacctgggtgacagagcaagactctgtctcaaaaaaataaaaaataaataatgaaatgctacccagcaatgaaaatgaacatgctacaactacatgcaacaatgtagatgaatctgtaagtttaactcctggtgagactaatctatggagttagaagttaaaatactgtttaaccttgggggctgtgggtaatgactggaaggggcttctgtggggctgaatgttctatttcttgatttgggtgtttgttagacatgtgtgttggctttgtggaaattcaacaggctttacacttacgatttctgtacttttatgtctttatattatactctaataaaaagctttaaaatttcagaatatttttgaaaacagttttttttttctcccccacccccacctttttgtgtatgtatggtcacttgatattcttccactttttaaaattgtgtaattattagtctatttcttctattttttcaatgatttttttcctgaagagcaagccatggcttgcccatagtaagcccccaccccaccaccgcttttttttttttttttttgagatagagtctcactctgtcatccaggctggagtgcagtggtgcagtctcagctcactgcaacctctgcttcccaggctcaagtgatcctcccatctcagcttcccatggagctgggactacaggcatgatgcaccaccacgattggctaatttctgtatttttttgtagagacggggttttgccatgttgccctggctggtccctaattcctgggctgacacaatccacctacctccacctccgaaagtgctgggattacaggcatgagccactgcgcctcgccatagcatgtctttatgcaaagcacaagtgaccccctcctcaaggcattttatttccatatatctgaaaattgttacaacgaacagattctgaaataacaaggcattttactgccatctactggtaaattatcataataaatttgcaaattataatgtcatgtgaatggtgtccacttaaaagtgatatccttcaagactagtgaacaatacagtcaggatggctagaagtgaccccaggaaactaaggggcaagatgtctgcttttgccttctttgtgcagacgtgcagagaagagcataagaaaaatccagaggtccctgtcaattttgcagaattttccaaaaagtgctctgagaggtggaagacaatgtctgggaaagagaagtctaggctgggcacggcggcttacgcctgtaatctcagcactttgggagggtgagttgggtggatcacctgaggtaaggagtttgagaccagcctggccaacatggtgaaacctcgtctctactaaaaatacaaaaaactagccgggcgtgttggtgggcgcctgtaatcccagctactggggaggctgaggcaggagaatggcttgaacccaggaggcagaggttgcggtgagctgagatcgtgccactgcactccagcctgggcaataagagcaaaactccatctcagaaaaaaaaaaagagagagagagtctaaattcgattaaatggcaaaggcggataaagtgcactgtgatagagaaatgaaggattatggaccagctaagggaggcaagaacgatcctaatgcccccaaaaggccactgtctggattcttcctgttctgttcagaattctgccccaagatcaaatccacaaaccctggcatctctattggagacgtggcaaaaaagctgggtgagatgtggaataacttaaatgacagtgaaaagcagccttatgtcactaaggtggcaaagctgaagaagtatgagaaggatgttgctgactataagtcgaaaggaaagttggacggcacaaaaggtcctgctaaagttgcctgggaaaagatggaagaagaagatgaagaagatggggaggaagagaaggaggatgaataaataaactgtttgcctataaaaaaaaaaggtgatatccttctgcagggcaaaattcatccaactaaatgtggtaagtttgtcatttggcactgttgtgacgaaccctgcagacagtaaaatgttgacactttctagatggttttgttctttcttttttcccctgttttattattgtttttcttaaagacatcattgaagtattcactgtcagtcttatcactgcagagcttgagcctgtttggacacacatgaaagtagaagtccaataaatacaaatcaaattatcaaagaacaattgatttgctttttcttcactctagtccaaatctagaacaatcctggatgttttaggactgtttttcttgctcaaaacattttatgaaatagcctgaccacctcttcagaagcctctctcaatctattgcttgttgagactatcataagcactaagctttctcctaaacatttataggtataaattcattaatatgcttgacaaccttatgaagtaggagcccttattctctgcatcccacaggtgaggcaactgaagcacaaagaagttaagttacatttcaagtgaggatattacaaacatagcttccttggggagcttacagtctactggggatatagaatgaaacaaaacccatgtaaagatttttaaacaatataaatgagaaaatactttggaccctgttggacaagtcatttatctccttttggttgcagtttcttcacatagctaataaatggcagagctagaatctgaacttgggtgttcagattcactttggcttcagagcccaatattgtaatcattatgctatactatctgctagtttatggcctgtttttgttcttttgctgcctgcctgcaggcaacaagtatttgtgttgcctaggctcctgctatttttacctacaggatctgcaggtgcccaatgcgcccctgtcttctcagctctttgcattcttgcagatcccaggaacacccatgacccttggcttaaggacatggacaacaaggtgaaaaaattaggatagtggctctggaatcttttgtgcgtgtgtatggtaaaatacatatataacataaaatttgccattttaaccatttttaagcatataattcggtggcattaagtatattcacatgcaaccatcaccaccatctacctccagaactttgttttccccaactgaaactttgtattcattaaacacaaacttcccattccctctccctctagcccttggcaaccactctactttctgtctttatgaatttgactactttaggaacctcatataggaggaatcatacaatatttgtctttttgtgaccgacttatttcacttagcataatatcttcaaggttcatctgtggtgtacgtcgggtcagaatttccttccttcatgaaggctgagcgatgcttcattgcatgtatagaccacattttgcttatctattcaactgtctatagatatgtaggttgcttccacatgttggctattgtgaacaatgctgctgtgaacaggggtgcacaaatatctctttgaaactctgctttcacttctttattttttaaattttatttcgaaacagggttttgctccatcacccaggctggaatgcaggaatggaaacatggctcactgcagcctcaacctcctgggctcaactgatcctctcgccttagcctcctgggtagctgggaccacaggtatgtgctgccacacctggcttgttcatttatttatttttaaactttgagacagggtctcatctgtcacccaggctggagtacagtggtactaatgtgatttcacttattttggatgaatacccagaagtggaattactggctcatagggtaatcctatgtttaacatttttttccttgagactgggtcttgctatgttgcccagggtggactcaaactcctgggttcaagtgatcctcctgccctagcctcccaagtagctgggattacaggggcgcctatgtttaactttttgaggaaatgccaaactgttttccaccatggctgcatcaatttatattcctggctgggcgcagtggctcacgcctgtaatcccagcattttgggaggccaaggcaggtggaacacttgagcccaggagtttgagactagcctgggcaacagggtgaaaccctgtctctacagaaaatgcaaagattggccgggcatggtggcgcatgcctgtaatcccagctactctggaggctggggcatgagaattgcttgaacccgggaggcggaggttgcagtgagccgagattgcaccactgcactccagcctgggtgacagagcgagatcgtctcaaagaaaaacaaaaaacaaaaacaaaatacattcccaccagcaatgcataaaagtgctaatttctccgcatctttgccaaaacttgttattttctgccttttaaaaaaataacagcagctgggcgccgtggctcacgcctgtaatcctaacacattgggaggccaaggcagggggaatgactgagctcaggagtttgagaccagcctggacaacatggcaaaaccccacctctactaaaaatacaaaaaattagctggccatggtggtgcgcgcctgtaattccggctacttcagaggctgaggtacaagaattgcttgaacctgggaggcagaggttgcagtgagctgagatcgcaccactgcactccagtctgggcgacagagtgagattctgtctcaataaataaatacatacatacataaatagggtatgaattggtatctcattgtggttttgatttgcatttccttaatgactacagagattgaacatcttttcatgtgcttattagccatttgtatatcttctttgaagaaatgtctattcaagtcctttgccttttttttttgagacagggtctcactctgtcacccagtctggagagcagtgatgtgatcttggcttactgtagcctccaattcccaggctgaagtgatccttccacctcagtctcatgagtagttgggattacgggcacacacgaccatgaccagctaatttttaaattttttgtagagatgaagtcttactgtgttgcccaggctggtctcaaactcctggactcaagcaatcctcctgccttggcctcccaaagtgctggaattacaggcatgagccatagcacccagtcttattgctgagtttctggaatctttgagagctttcttatctctagaagtctttgtgggtttggaaatatgtcagtgaggtcttctcagcctctgggctggctgttgtcaggacctctgtgtctgtaggatgaagtagccagagcttttcattcagtctttcaggttaattaatcaagtcattcattaattgtatctttatccaaaaaatcaccctttggctatgtcagatttccaggctaacacaagagtacaaactgtatggttctgtttctatggagatcaaaaactgtcaaagttaatctacggctgggcgtggtggctcatgcctgtaatcccagcactttgggaagccaaggcgggcagatcacaaggtcaggagatcgagaccacggtgaaaccccgtctctactaaaaatacaaaaaattagcctggcgtggtggtgggtgcctgtagtcccagctactcaggaggttgaggcaggagaatggcgtgaacccgggaggcagagcttgcagtgagccgagattgtgccactgcactccagcctgggcgacagagcgcgactccatctcaaaaaaaaaaaaaaagttaatctatggtgctagaagtcagaataatggttacatctgggggagcaggtatttattagaagagaacatacaaaagagaacaaaagggaactttctgggttgatagatctataacttgatctaggtggtggtaacacaggaatgtaggcaaaaaaattattagatatacacttaatagtttttcattttattgtatataaattatatttcagtttttaaaagttaaaataaaaagcttcagaaaagtttttttttccaggatattttaaatttatttggtgttaatttcataggctcaaaggtctaaggtgcccccctgttgcggttgcctgtggttctctttgctcctgtctgccctcttgggcccaatacctagtattgtgcttaggattcacaaacgcaacaaatacttactgagcacctactctgtgccaggtgctgtgctatatgctgagaaaacaatgttaaacaagatggataaggttttcttccttatggtgtccatagtctagtggcaaagacaggtaataatgactcagtgtattctactaaggacaagcatatcgtgctaagaaaacctgtgtgggaatgggtcagggaaggtatccttggagtagccccgtttgaactgggatctgaagactgagagttatctaagtggggagagcattgcaggcagggggatcagcatgtgcaagggttctcagaaaggagggagaacaatgtgtaagaaatatcactgtagttgcaacccagagaaaggggaagagggccctaagataaatctagagatgtggggaggccaacatttatttggtctttatcttttttttagagacggagtcgcgctctgtcgcccagcctggagtgcagtggcgcgatctcggctcactgcaagctccgcctcctgggttcacaccattctcctgcctcagcctcccgagtagctgggactacaggcgcctgccaccacgcccggctaattttttgtattttcagtagagacggggtttcaccgtgttagccaggatggtccgatctcctgatcttgtgatctgcccgcctcggcctcccaaagtgctgggattacaggcgtgagccaccgcgcccggcttggcctttatcttaagagcaatgtagagccatcagatttttttttttttttgagacagggtctcactctattgcccaggctggagtgcaatgatatgatcttagcttactgcagcctcaacctcccaggctcaggcaatcctcccacctcaacctccaaagtggctggggccacaggtgtgcagcaccatgcctgctatgtttttgtcttttgttgtctttttgagacacggtttccctttgccacccaggcaggagggcagtggtgttatctcggctcactgaagcctccaccttccagctcaagtgattcttgcctcatgcctcagcctcccgattagctgggactacaggtgtgcaccaccatgcccagctaatttttgtattttcagtagagatggggttttgccatgttgcccagactagtctcgaacttctgagctgacgtgatccacccacctcgacctcccaaagtgctggaattataggcatgagccactgagcccagccatttttgtattttttgttgagacagcgtttgccatgttgctcagcccggtcttgaactcctgggctcaaacaatccacctgcctcagcctcccaaagtgttgggattacaggtgtgagccactgcacctggccatcaacagatacttttaagtagagtagtgacatgatcatatttctgatcattagaaacattactctgacagcagggtggagaatagattagagggcggtcagggtaatgtgaaaagatggtgggtatctactacaccagtccaagcacactgtgtgtactcaataaatattgatggaatgaaagggttcctgactccctttcttctatgggatcagtaggactgatttgtttaattagtttacaatccacctgctcatcctctatctcctgggatgctcagaacagaccccaactcccattttacagatgaagatgctcaagttcagagaggcaaggacagctatcaagagcgaaagccaaagagagctgccatacaatccagcaatcccattcttaggtatacaccggaaagaaaggaaatcagtgtatggaagagatctgcactctcatgtttactgcatccctgttcacaacagccaagatttggaagcaacctaagtgtccatcaacagatgaatggataaataaaatgtacatatacacaatggaatactattccgccattaaaaaagagtgagatcgtgtcatttgcaacaatatggatggaactggaggtcattatgttatgtgaaagaagccgggcacagaaagacaaacttcacatgttctcacttatttgtgggagcaaaaaattaactattttttatttttttttgagacggagtctcactcagccacctaggctggagtgcagtggcgcgagctaggctcaccgcaaccaccatctcccaggttcaagagattctcccgtctcagcctcctgagtagctgggattacaggcacccgccatcatgcccacctagcttttgtattttagtagagacagggtttcaccatgttggccaggctggtcttgaactcctgacctcaggtgatccgcccatcttggcctcccaaagtgctaggattacaggcgtgagccaccatgccgggccaggagcgaaaaattaaaacaattgaactcatggagatagagaatagaaggagggttaccagaggctggtaagattaatggggaggtaggtgggaagtgggaatgattaacgggtacaaaagaatagttagaaagaataagacctagtatttgctagcacaagaaggtgactacagtaaaaaacaattggccgggcgcggtggctcacgcctataatcccagcactttgaggggcagaggcgggcggatcatgaggtcaggagttcctgaccagcccggccaatatggtgaaaccccatctctacttaaaaaatatacaaaaattagctgggcgtggtggcatgcgcctgtagtaccagctactcaggaggctgaggcaggcgaatcccttgaaccagggaggcggaagttgcagtgagctgagatcgcgccactgcactccagcctgggcgacggagtgagactccgtctcaaaaaaacaaaaataaaacaaaaaacaaaaaaaaaaccacacacacacaaaatttacttgtacattttaaaataactagagtataattgggttatttgtaacacaaaggataaatgcttgagttgctagataccccatttaccatgatgtgattacacatcgcatgcctgtatcaaaatctcatgtaccccataaatatattcacctactacgtacttacgaaaatttaaaaaatacatcagtgtagtgtgggaaaaaacagaaaatttttaaaaaagagtgaaagccagatatgaatccaggcctgtatgacagacatgaagtccagtgctgaggaggcctttctacgtttgggaagaggggaggggccacactcgttcgatcaataattctatttactgagcattttagcttgctagggaggtaatgatgggaaaaagaagagagggatttagaggcaaataataatgaaagcttttatctatatcccattaagcttattattagacagtatgtgtcaggcacggtgacaagtgctttccaagcccacctccatttgctcttcacaagcactatgattttccccatatttcagatgggtaaactgaggcttggagttgccatgtccaaggatactcagagcgctcgcaaaagactgtgcaatgtgtgcttccgaagtgggactcactggcgagagaatagccctggaaagccgacagagacccacgagatcccagcactaagcactcagcaccgaagggagctggcgcgcgctccacctcgcgctcccggggacgtctggtcacgtgggcaatgccccgcccctcgagtccgccccgccccctctcgcgctccctccctctctccctccctccccctccctccccggcccggtccggcccatccccctccccgccggctccgtgaggccctgccgggtcgggctgcgggcggccgggcgcgggcggcgggacagacgggcgcacgcgaggactgacggacggacgcaccgagggcggcgggcacgcacggcccgggccggcgctccaaggcccgcccgggagggccggggccgcgctcaggtgaggggacggcggcgcgggcccgtaaggggtgggcccgccgggcgtccgcggtccttgtcgggctggcttcgcggggaggaggcgccgcccgggcccgcgcggaaaaatggcgccgggcgaccgagtggcacggtctgagagcgggcccggcccggagccgccccgcccgccgcgcttgtgtccccgtcgccatgttggggagcgggccccaggcctgcgggcgggggcgctggagggagcggcggccgggctgggtggggagggtgctgggcgcgggggccggtgcactgagggagtgcagggctggccggggtctgcacggggtggcgctccaggcctggggaacaggcgggagccggtcgtggggtcgtggtcagggtcgcggagaaggaacactgggtccgaagggaaccgggattggggtctatgggctgagaggatggcaggacgtggaactgggttaggccttaggcggtgttagagccctaatgcaggtaggacctggggattggggtggaggcatgggggccaagctcaggctgtcagggctggagcagttctttgctgggagggaaggaggtgattgatgaggaatgagggccctttgggtacagacgctggttcagattggggcagtccttggggtactggggctgaattgcaaagctgtataactcccaaggctctgaagacttatgtcccaagcatcctccaccccctcttgggggaagcaacaggaaaaaggaggtgtttgatgagagaaaagggggacaaagggagactgaggtttgggtgcaggagctggccagcaaaagaggcacagagagtggaactggttggcaaggaaggagagaacctttatcaacttagggagttgtgtgtgtctttaaaaggagggacctggctgtttgggggcggtgacccaaggtgtcttccctggaaggggacagcccacagcttaagagcagagtcacctggagaggtcatcagaaaggcgttattgaagccagtaaaatggtgaagaagagtgaatgtataaaaactacaaaggcctgagagatcaagtaaagatttcaaatcaggtagtgattttagctgaaacatagaaaggtaaagttgacttttcaagatcttacaagttagtggcagaggggtactagaaattgtcggctgcttcctcactaaacacattgccttaaaggaatttgctagctgggagaaaggtgttaagaaatgaagcataacattcttgtgatgaaactaaaagcaaacaaacaaaaacaacaagaaatgaagcataacagtatataccagataactattaaatttgttttcttcctgtaatgagtgtggcaatacaaaggctgaagggaatacaaaaaagtataggcagccagttatttggtatttcctggttcatctctaattgtgcaaagaagttatctttgagaccttctaactttctagagttttaagaggtgctccggccagccacagtggctcacgcctgtaatcccaacactttgggaggccaaggtgggaggatttcttgagcccaggagctggcagaccccatctctacaaaagaaataaaaaaaattagccacctgatgtggcttgtacttgtagtcccagctactcaggaggctgaggtgggaggatcgcttgagcctgggaggtcaaggctgcaatgagccatgctatggtcattccatgacattcctgcctgggcgacagagcaagacactgtctaaagaaaaaaaaaaaagagagatgctccttctcttctaggtgtttaccacaaaggaacacaaaatcctaaaaaagaaaagtgaaaaattgtagacacccagagtctctattttattaattgaagttggatcatgttagagaagaattcaaagttcgcatgggctatgggagagttctgaaggaaatatgcaaattagtcatggaaaataggtccagggccccatataatcaaagagaattagcgaacaaaaatattatgcgggcatatataaaataaaactgtcaataccatatgtatatacagcaacacaattcatttgttctgggtttttcttttcttttcttttcttttttttctgtttgtagagttggggtttcaacatgttgcccaggctggtcttgaaatcctgagctcaagtgatctgcccacctgagcctcccaaagtgctgggattacaggcgtgagccaccgcgcccagcctattctgggtttttctaatgcaggaagacctgaccttatctgtgccatggacccctttcagaataatattttttaattgtataaaataaagtacattgaattataaggaacaccaattatattaaaatacagtttccaaaatatacaaatctaatatgcatatacttgtttatcagcacgttaagaaatcagatttagtgatggatccgataattataatttcaaagacatgatgcgcataaaggctacttcaagattatatgcaacaattgtagtatgatataaagatatttgagatttctgttgttacagagtcacagaactgctaatactagaatggtatgttacctacactcatatttgaatagaatggtaattttcagttaaaagttagtaaaagagatttttttctccctgtccaagttcacaagccccactgaagtcctatctatagactcctgtctatgaaccccaggttaagaaaccctactcctactgccaggcatgtcttccattcagcaaacgtttactgtgcctcaaggcatctactgcatatcaagcattatactgggctctgtagcttcagaagtttttaaggcagagtcacttcactttgggtatgcagccccatgagtgaagtagacatgtgaacaatcatagttcaggatggtcgatgccaaagaagagttattaaacgctataaggacacggagatgggtgtgtctgctcaaagaatcagggaaggtgttgcgaaggggtgacatttgagatgtgtcctaaaagatacaggaatttgccagtgaaatggagagaagggcctttcaggtaaagacacgttttcagggaatgtattaataactgaatgtggctggagcatagaatgtgtgtgaaagcatggccagagatgagactaggaagaccatgttaggaacctggttgtgaaggaccttgctaaggagtttggactgaatccttagctgagagaggcattcaagatcttcgagaaggggagtatgtggtggaggtttaatttctaggagataaatggatgttctttggaaggagggtagactgaagaccagagaggtaatgaggatctgaactaaggcagagactgtgggcactgagcagagttagaagtaatgaggatctgaactaaggcagagactgtgggcactgagcagagttagaagtaatgaggatctgaactaaggcagaggctgtgggcattgagtggagttagaatttgcaggtgttgattattgacattgtgagtggcttagggggagttttttaaatttctggtttggggtggtgtctgtcaaagaggtttaaaaaagtgaaaggaagtctgggcgtgttggctcacgcctgtaatcccagcactttgggaggccgaggcgggcggatcacgaggtcaggagatcgagaccatcctggctaacatggtgaaaccccatctctactaaaaatacaaaaaattagccgggcgtggtggcgggcgcctgtagtcgcagctactcgggaggctgaggcaggagaatggtgtgaacccgggaggcggagcttgcagtgagccgagatcgcaccactgcactccagcccaggcaacagagcgtgactccgtctcaaaaaaaaaaaaaaaagtgaaaggaaaatgaggggagaattctcattgataataagggcgaaaaggtttttttggcagagtaatagagttttggaaaccattgcaaagctgtcaagtgtggtgtagtttttggttaaggaaatcagaggtgtcagcagacataaaagacaggggaaaacatgggaagtgtcctacctatagtgtagaaaaagcacaactatctatgtcagaggtcgacagactgtggtccataggtcaaatctggcccacgatctgtttttgtaaataacgttttattggaacatagccacactcatttatttatatattgtccatatcttcttttgtggtaccaatagcagagttgagtagtcgtgacagagatgtgttgtgtcagctcacaaagctggaaatactctttacaaaaacatttgccaacccctgatctatgtgtttgagtgttggatgttcaacctctaatttgccatccaatgtctatatgatgatagagaatgaataaacgtcttggctctgccctttgggctggattacccatgctctgtgtacctgcagcataacacagacccctgaatatttatatcagtcagtgatggcaaggtctattgttctggagtgtactgtgtggtaactgtggtagtgccagctttacacggattagataatgctcgggcttgttttgccattttttttattgggttgtcttttacaaaagatttatttatatattctgattattaatcctttgttgttggtagatattacagatgtcatttcccagtttcttgcttattttaatttttttttttttttttttgagatgaagtcttgctctgtcgcccaggctggagtgcagtcgtgccatctcagctcattgtaacctccgtctcccaggttcaagtgattctcttgcctcagcctcccaagtagctgggactacaggcatgtgccaccacacctggctgatttttgtgtttttagtagggatggggtttcatcatgttggccaggctggtctcaaactcctgacctcaagtgatccacccgtcttggcctcctaaagtgctgggattacaggtgtgagccactgcgcctggcctgttgcttattttaaaacatctgttttaaggtgtcatttgttaaaaagttctgaattttagtatcaactttatcaatcttttcctttaagatttgcagttattctttgttttgaggcagggtctcgctctgtcaccgaggctggagtgcagtggtgcgatctcggctcactgcagcctcaacctcctgggctcaagcaaccctcccacctcccatgccagttgagaccacaggcatgcgccaccatgccctgctactttttgcattttttgtagaggcggggtttcgccatgttgcccaggctagtctggaactcctgagctcaagcagtccacaaagtgctgggattacaggtgtgagctactgtgcccagcctgcaattattctttatattctggaatacctactgttgttttcaatggttagatctttaatgtatctggaatggattcttatgtgtagtgtaaggtcgggtccagtttcattttttttccctatgtataaccagtgatcccagcatcatttattgaatggggcttgctttcaaattgtgagctctttttggtggagtctgtctcaggtccttattaagcactgctgcttgctgattgtgtgaccttggacaaataaaacctcattgcgcctcagtctttaaggataatagtaatctcatagggttttgtgaggattaaatgagtcaatatacataacgtgtaaaacagtgcttggcacctagaacatgctcaataaatattagctgtactttagcactactgttcatttctgattcctcagcacctggtacagagcaggggctcattttgctcaattaaattgccaaattaatttggttttcaggtcaatcagaatggtgagagttgggctgagtgttgcaggagatgcttccaaggagctacttagttttaggggctgccttagattatctgctaggatagaactcttctcacgccatcacttttgcagagaacttctgtagcagaggttgcaaactggcaacctgtggttggatttgacctgtataagtattttgtttggtttacacaatatttttaatgtcttaaaaatgtacacagacctctgagtttctgacttaaccttgaaaaattggaagatctgtcaacagcaagcccatattcatttatagcggtaaccagctgaaacttttaggtgagatgtgtttcctagttctccatagtctgccttgctgtcttgctttgctctttatttttatggccctgcagacatttaattttctgattcttactttattgaggtattgaatattgtctcccccaaaccagtaaatgacatattgggatggtgggggggatggccagaaattgacagatgagtttgtgggcaagtaaatactaaaacctatttctaaggatgagccatacttgatcataatgaatagaatgataaatgaaattaaaagatgaggtgaaattcagcttagctccttgaatatttaggcatctactatgtattaagtactgtattagaaattaccacattggtgatagaaaattagctggccagctttatgaaatactgtagaagaactctttttacttgtattgtggagctgttgtctaagagagtggttggacgagaaaggaaatataggtattattttctcaaacatttgttgagccctaccatgtattctggaaactggctagaactctgcaagataccaagatgaatctagccaaggtttctatgctgaggaatgtctgtaatgtgttatggagctgggatactagagaatggtacctgaaagaggtggtctgtgaacgaagctgccaagaatagttagtatcttaatacttggagatgagacagtgctgtattttccaggctgagtgaaagcataaacacagaggtgggtatttaggagatggtaaagagtccactttgcttggagaagaggattgttataagggtgttgttggaattaagggtggaaatggagatgaacaatagtaacaataatagataaaacctaaaataaataaaacttaaaaaaattaatagtagtagtggcttttctttccccccagtgttctttgggtagggtttttttgttttgttttgttttgtttttaaatagaaccagggtcttactctgttgcccaggctggagtgcagtggcgtgattataactcattgcagtctttaattcctgggctcaagtgatctcctgccttggtctcccaaattgctaggattataggcacaagccatatgcctggccaatggctcacattttttgcatgcttactatttgcaagataatgtgctaagtatttcataagtagcattttatttaatccttacaacaacctgatgaggtaggcactggtttttaatccctttttacatataaaatgaagaagagagctaacaattgatacagaaagtatttgagtccaggtagtctaatttcaaagcctgccttcctaatctctgcataccatataatcaaatcatggaaggctttgaatacccatttctattccaagctgggaagtttgaacttgattgactaggtagtgggaagtcatcaaatgtttttcgccagtgatgtgatgaaagctgtacgttaggaaaggaagcctgattgtgaagtgtaggatcagcatggggagaaaggagagatatggagctagtttactctcttacttctcactagattgggtgagtgctcctttaggactgggctggtgtctgtctctgccttcccccttccctcccttcagctccagtgtctgcctattttgatgtctggtatattcatttatttttttaaatgtgatctttttctacctcaccttattctaaaaaggacataaagtagctgcctaggagctcaataaacattctgagttaattagtaaataactagagttacatttagatgtatacacaaatgaaatactatggctttgatggaaggaggaatgcagccctagagttggtcatatgctttatttgatatacaatctctataaagcagaaggccaggaccatacctttactttgtgatgaattgtgtattctatgtcagttataatattcattatcagttaataaattaactatatcagttaatattaatgagcaccaaattcagagggcattcatactttaaacagatatttcagtttgtatttagcattaaccagctgcaacccctccccctccgtcacacacacaaaggcaacaaaagttcccattaatcagctcctttactgatattgaatctgttgaatatcagttccgtagtacccatttatatacattttcttttgcttttgcttttgcttttttgtgtgtgtgtgtgatggagtctcactctgttgcccaggctggagtgcagtggtgagatcttggctcattgcaacctccgcctcctgggttcaagtgattctcctgtctcaacctcctgagtagctgggactacaggcaactgccaccacgcccagctaatttttttgtagttttagtagagatggggtttgaccatattggtcaggctggtctcgaactcctgaccttaggtgatccacctgcctcggcctcccaaagtgctgggattacaggtgtgagccactgcacccagctgctcttttttgtttgtttgtttgtttgtttgtttttggagacagcatctcactcccttgcccaggctggagtgcagtggtgcaaacttggctcactgcaacctctgcctcccaggttcaagtgattctcctgcctcagcctcccaaatagctggctcatacctgtaatcccaacactttaggaggccaaggtgggtggatcacttgagttcaggagtttgagaccagcctggccaacatggtaaaaccccatctctactaaaagtacaaaaattagccaggcgtgctggcatgtgcatctaatcgcacctacttgagaggctgagccttccatcaattcttggtgctccttggcttgtagctgcatcactccatctttgcctctgttgtcacatggcgttttccctgtatgtctctgtgtccaaatttcccttataaggtcactagtaggtcccaccctactccagtaggagtaacttcatcttaattgattacctctgcagcgactctgtttccaaatcaggtcacattctgaggtactgagagttaagactaacatatttggcagggatgggattggggggcacaagtcaacacataacaggtagtgtttgagataacatagaggcattaaattaaaatttattaaaatggaagggtaagattgcaacaaatgggattaaggagagagtaaccaaaggaatgatggacataggaaaatgtaaggaatatttaggtaatgaaatagtgagaagtctgatttgctggtttgttgaggagttgtggagaagtgaagccgacgtactttcttggggccctggatgccaggtctaagacatttgaatgttgctgagtgaccagtgtgtgggagcaggatggcactgcggaattttgaaatggtagataattgattcaagctttgagtaactgagtcaagttttagagacattctaatatgatcaggtgatcatggataagtaaacaccctgtagaaaaacagatggtcaatgacaacacacccagcctccctcattttcctatgccagtaacttttgccagcacaataaagaaatctctcttctgtaaaacaacaaactttgagggttttgttagccctctcttcttggtgagtcatctgtgggcattgagagatacatcagcttttcagggtctccattcaaaagcctccccatggatatttcagtgttaatagtcatgtcacacttcatttgatttcaaaccattcttcaaaattacctcttttccatcctattctttacctcttggtttttctttgaaacttcttcagtttttccataatttaaaaaaatattggaaagaattgaggaaaactgagtattgttttaaaataacaaatagaattgaggaagactgggtactgtccaggctaatgatatgctctttttctgtgtctttttatttttaaattattatttaaaaaaaaaatagagtctcgctttgtcacccaggctggagtgcagtggtgtgatcatggctcactgctgcctcaacctcccaggctcaagcgatcctcttacctcagtctcctgagtgaacacgtgggactacaggtgttcaccacctcacctggctttttttttttttggggtagagaatgggtcttcctatgttgcccaggccagtctcaacctcctgggtttaagcgatactcttgcctcccaaaatgctgggattacaggcgtgtgccactgtgctcagcctgtgtctttttaatggtagcaatgttggccttgcccaggatagtactgtatttaaattgtgaatactcatttgaattgtggtcagtaatagccctcaggtgctttctttatttgtgcccaggcagttcttcctgattttatatttgcattgtttatactttttctaatagcacgtgtccccatgaaattttaaaaattatgtttaaggctgtacactgtggctcacacctgtaattccagcactttgcaaggccaaggcgggtggatcacctgaggttaggagttcgtgaccagcctggccaacatggtgaaaccccgtctctcctaaaaatacaaaaattagcctggcgtggtggcgtgcgcctgtaatcccagctacttgggaggctcaggcaggaaaattgcttgaacctgggaggcagaggttgcggtgagccaagatcatgccgtagcactccagcctgggtgacaagagtgagactccgtctcaaaaaacaaaaaaaaattatgtttaaataccgcaagtacataacttctgagtcattttcatattcatacagtctttacaaatttaattcatataaaggtttttttagtcttttttcatttggcaatatattgacgtacttttctacacatctgtatatttatcatttttaatggatatatgacaaccaaagtctaaaatactctggttatttggcatttgggtgattttcagttcgtttttatttatattttacaattttttttttccccaagatggagtcttactctgtcacccaggctggagtgtagtggcgtgatctcagctcactgcaacctccacctcccaggttcaagcagttctcctacctcagcctcctgagtagctaggattacaggcatgcgccaccatgcctggctaatttttgtattttcacgggattttgtatttcatgggatttcaccgtgttgaccaggctggtctcgaactcctgacctcgtgatctgcccgcctcagcctcccaaagtgctgggattacaggagtgagccaccatgcccagccctattttacaattctaaattgtagcgctgttacatctttttataaatcttttttcttccagtttttttcttagaatatattccctaaaatgatttcattaggtctgaggctatcactttttagccacattgtcagattattcttcagaacaactaccagtttatagtgccactagctactagttaaaattgaatttcataaattttttcttctagtataatagcagttcttcagttttgtgggctttttttgatattttaaatgttttattaaaactttaaaacatagaaaaagccccaggaataatagtacagtgaaccacccttatactcaccatctatattcaacatgttgtcatatgtttaataatatgtttattatgttaaactttttaaaaataaagatatcatgatactatgcctttaatattttagcacacatcacctgcaagtaaggatattcttctacataaacacaataccattattaacacctaacaaaacagtaatttcttaatattatctaacattaagtctgtaagtttctccagttgtctccaaaatgaccttttttttttttttttaagacagagtttcactctgttgcccagactggaatacagtggtgcagtctcagcttactgcagcctctgccccgtgggttcaagcgtttctcctgcctcagcctcccaggtagctgggattacaggtgcccgccaccatgcctggctaatttttatattttcagtagagacagggtttcaccatgttggccaagatggtctcgaactcctgacctaaagtgatccaccctcctcggcctcccaaagtgctgggaatacaggcgtgaaccactgcacccagcctatttttttgttttttttttttctgagacagtgtttcactcttgtctcccaggctggagtgcaatggcgtgatctcgactcactgcaacctcctcctcccgggttcaagcaattctcctgcctcagcctccctagtagctgggattataggggtgttccaccattcccagctaattttatatttttaatagagacagggtttcaccatgttggccaggctggcctccaactcctgacctcattataggtggtctacccacctcagcctcccagtgtgctgggattataggcatgagtcactgtgaccggccgtaatttttaaattttttttgtagaagtggggtctccctatgttgcccagggtggtctcaaactcgtaggctcaagcagtcctcctgccttggcctcccaaggtgctgggattacaggcgtgagctaccacgcctgacctcttctagattttatttctgtttttgtattattcatttgtaattttttttctctttgttgcaatttgggcacagatttatttctttgttttttttatgtaacaacgtgggaaaaatctcactgagcctctgacttacggtttataatatgtttataatatgtgttgggatgagtggttttggaaatctcaagtttcatgttttactaatttatcttttgtttcttatactaagaagttaggattgaagtttaaaaattaatgttaatatttcctaatcccttaaattgtctattatccctaccaagagcaaaccagggttgttgtattgaaatgccaatcaccttgacaggcattttgttgatcctttcagagcattaagtttctctgatttggctggagagctgcacaaattttcccttgggagccccagatctgagaataagcatgaaatagtttttttgttgttgttttttttttttttaagacagagtctccatctgtcgccacactggagtgcagtggcgcaatctcagctcactgcaacctcttcctccctggttcaagagattctcatgcctcagcctcccaagtagctgggactacaggcacatgccaccacgcccagctaattttttttttgtatttttagtaggtacagggtttcaccatgttggccaggctggtcttgatctcttgaccttgtgatcctcccacctcggcctcccaaagtgctgggattacaggcatgagccaccgtgcccggccaccatgaaatagttttataaggacctcatgaaagggtatagggaggatgaaattggatcttataatagttatgcctaggcaaattgtctttaacagtgagcatttaactgtttatttagacactttaacaatgtcttataagttatcctgaaacatttaaggttgtgtggttacaaggccaacttaattttttaaatactataagtgtaatattcagatggaggcattcatgaaataatgttgtttcaattaaccattccacagtctttttgttcttgtatagtaacttcaggagcaggaaagtgcctagcagagtgctagtaggcagttggtaaagggtagtcaaataaatgcatccatggaaagttttcaaattacagtagattattagaaattaagaaagacttctgttacatattgagagatacatatttctcataaaaataactcatgttctgtaaatctgaaattgattcataaaatgaagttttttaaatgcaggcaaaagagtctcatgatgataaagaatcaacaatgttattattagccaactgagagggagaggttgttgcacctagacaacagatcagaggtttgcatttgatacaagctgaagaatatgcttgtatttatgaagcaggtgccagaggaattctagtatttttattttacaaagctactttaaacatatttgaatagagataatcatttgtaaaatgcattttgaaagcatatatatatatatatatatatatatatatatatacacgttgttgttgttgttgttaaatagtccttgagttttcttaaacctggaaggaacctgagattctgtttagtcctagctctggtgttcatcctctcattttaatactcttagaccagagagatttatgtcttgccctaaatcataaaacaactttatgggacagccatgactaaaacccactctgcaatgctcagcctagccctttttccgttctatcaccctatattttcatatcaaaaataatgctagtctatctgaataggtacacagttgattttactactaatagtttgacatatgtctacattgaaagcatttgaaaaaggatattgaggttaagaaatggttgcacagagtccgggcacggtggctcacacctgtaatcccagcactttgggaggccaaggtgggcagatcacaaggtcaggagatcgagaccacggtgaaaccgcgactcttctaaaaatacaaaaaaattagctgggcatggtggcgggcgcctgtagtcccagctactcgggaggctgaggcaggagaatggcgtgaacccgggaggcggagcttgcagtgagccgagattgcaccactgcactccagcctgggtgacagagcgagactccgtctcaaaaacaaacaaaaaaaaaaaaagaaaaaaaatggttgcatgggcgttaggctttatttaatttcctcatatggatggtacaatagcttcaatagtgcacagttatgaacccaggacatgtgttttctatttacttgtttgcttgttttttgcagttctcacttgtaatacttatttttttcatagtcttaagtaggaaagtaatgttaaattaaaaagtataataatatcaacatatttacaatttataacagaaagagtaggaaagtgatatgaaggacttcatttgtagctaactatatctgtgacctaggacaaatcatgtaaccttgactatttctgatacctgcttacttagaatctttcagagattctgcccaggacaaatgtatctattgtaaaaatgtgttaattgatgtgtaacatacaaagaaaagcacacaaattataaggttaatgaattataaaattaacacacttgtgtaaccactactgtggtatttcaaaagtatattgagcctctttgatgattataagctttccttaataaaagccactggactagaaattgtagataggtcatctgtcttttacaactctttttttttgagacagtctagctctgtcacccaggctggagtgcagtggtgcaatctccactcactgcaacctctgcctcccaggttcaagtgattctcctgcctcagcctcccgagtggctgtgactacaggagtgcgccaccatgcctggctaattttttttatttttagtagagatggggttttgccatgttggtcaggttggtttcgaactccttacctcaggtgatccacccaccttggcttctcaaagtgctgggattacaggcgtgagccacagcacctggccttttacaactctttctagagtaaaattagcagaaacagtggtagagagaaggaatttggccaatcacaaaaatttattttgaataggtttataagggtttatatgtagtcttttcttctgatgtttctcttcttcctcttgccctttttcttttttgtttaggtcctgggaggaatggagaggggtcccactgactaacttttctgagagtggtcagagagttcttaagcaggtctgttgattctgtagaatacatgaaattcaatttataaaaggcctaatttcaacttaaaggattggattataaatagactttactttttaaaaaggaggcattttgatcctaatgtccatagggtattttactttggcaagctgcatttggcatgtgggttggatcaaaactgactaaattaaataagatctgcttaataaaaaagcattcaagtcatgtcttattagttatgttgaatacatgtaatatggcagaattctttattggttccatgaaaagtaccaagaaaagacaaaaaggtgaatttctcacttgttcataattctggaggcgaatggaggcatggataaatccaaaaagcaaaataagcatttatttggccttctctctgatattttcagaattcataactttgcagggggaaatcaaggctaccttacgatctcagagaagggcaggtgtatatagttagtttcattcagctgcctctctctctgtcatcttgaattagctttttcttgatcacacagataaaactttagctcagtgatttcccaaacctgtcttcacattgaaatcacctgtggagcttggacaactgatgccattgtccctttcccttccccagcagattgtgatttgattgccctgggagtatggcctggactttggaatttttaaaagatctcaagaagatctaaagtgcagacaaggctgggcactgtggctcacgcctgtaatcccagcacttcgggaggtcgaggcaggcggatcacctgaggtcaggggttcaagaccaggctgaccaacatagagaagccctgtctctactaaaaatacaaaattagccaggcgtggtggttcatgcctttactcccagatactcgggaggctgaggcaggagaatcgcttgaatccgggaggcagaggttgcagtgagccaagatcgcaccattgcactccagcctgagcaacaagagcgaaactccgactcaaaaaaaaaaaaaaaaaaagcacagacaagtttgggaaccactgctagctaaagcagaactggccactgtgtgacctgtgacttttttccccccataaatatttggataaatatttataaatagagggaaaaatattttgatttaagaatcctggctgggcacagttccagcactgtgatttgatttaagaatcctggctgggcagagttccagggaaggtagggcaggaggaccgtttgaggccaggagttggagatcagcctgggcaacatagcaagacactgtttcttttttttttttctttttgagacggaatctcgctctgttaccaggctgcagtgcagtggcaccatcttggctcactgcaacctccgcctcctgggttcaagcgattctcgtgcctcagcctcctgagtagctggaactacaggcgcctgccaccacacccagctaatttttgtgtttttagtagagacagggtttcaccatgttggccaaggtgatctcaaactcccgacttcatgtgatccaccctcctcggcctcccaaagtgctgggattacaggcatgagccaccaggccccgccagcaagatactgtttctacaaaaaaacaaaaactaaaaaaaaaggccgggcacggtggctcatgcctgtaatcccagcactttgggaggccgaggagggcggatcatgaggtcaggagatcgagaccatcctggctaacacggtgaaaccccgtctctattaaaaatacaaaaaattagccaggactagtggcaggcacctgtagtcccagccacttgggaggctgaggcaggagaatggtgtgaacccaggaggcggagcttgcagtgagctgagattgcaccactgtgctccagcctgagcgacagagcgagactccatctcaaaaaataaaaaaggaaattgccaggcagtttattcagcaggatttccatgtagggtacaatagttatttattgttgcataacagattaccacaaatttagtagtttaaaacaacatacatttttattatggcatgggtttccatgggtcaggaatcggcatagcctagatgggtcttctgtttcagggtctctcacaggaggtagtcaaggtgtcagccagggctggtgtctcatcttagcgcttggctggggaataatctgtttccaaactaacttggttggtgacagaattctcttcttgaagggatgttgaattgaagggcttggtttctcactggctgatggctggaggttgctctgaattcctttccatgtagcttcttcaacatcacaaagctgagaaaggaatagcaagtctcctaggaagatggaaatcacaattttttataatcatggagtggcatcctatcacattttccatagtccgttagttagaagcaaatcaccaggccagtccatactcaggaggaagagattacacaaaggcatgaacaccaggaggctggagtaattggtggccattttacaagtctgtctaccacagacttctttagaaaaaacaatcctaaaatttgtatggcaggcaccacaaaagaccttgagtagccaaagcaatcctgagcaaaaagagcaaagctggaggcagtacacttcttgacttgaaagtatacaaaactattgtaaccaaaacagcatggcactggcataaaaacagacacatagaccaatgaaacaccatagagaacccagaaataaatccacacgtttacagccaactgattttcaacagagacgcccaaaacatacattgataaaaagacagtctcttcaatgcatatgctgagaaaactggatatccacatggagaagaatgaaactagacccctatctctcaccatatacaaaaatcaactcaaaatgagctaaagacttaaatgtaagacctgaaactatgaaaccactaaaagaaaacatagaggaaacacttcaggacattggtctgtgcaaaggttttatagataagaccttaaaagcacaggcaacaaaaacaaaagctggcaaataggattatatccagttaagaaagcttctgcacagcaaaggaaacagtgaggagataacctgcagaatgggagaaaatatttgcagactattcatgtgacaagggattaatatctggaataaagaaggaactgaaatgtttcaacagtagaaaaacagtctgactttaaaaattgggtacttgatctgaatagacatttctccaaagaaaatgtaaaattgtcagcaagtatatgaaaatctgcttaacattactagtcatcaagaaatgcaaatcaaaaccacaatgagatattatttcaccccagttaaaatagtggctattaccaaaaagatggagaaaaggcaactattatatactgttgattggaatgtaaattagtacagccattatggaaaatagttatggaggttccttgaaaagccaaaaagagggctgggcgcagtggctcacgcctgtaatcccagcactttgggaggctgaggcgggtggatcacaaggtcaggagttcgagactagccaggctactatggtgaaaccctgtctctactaaaaatacaaaaattagctgggtacaatggtgtgcgcctgtaatcccagtactagggaggctgaggcaggagaatctcttgaacctgggagttggaggttgcagtgagccgagatcataccactgcatactagtctggggcctgggcaccagagtaagactccgtctcaaaaaaaaaaaaaagctaagaagagaactaccatatgatccagcaatcccactaataggtatatattcaaaggaaaggaaatcagtatgtcaaagagacatctacattctcatgtttattgcagcactattcacaatagccaagataatcaacttgtgtccatcagtacatgactagataaagaaaatgtggtatatataccataaaagaatgaaatcttgtcatttgtagcaacatgcatcagcctggaggacattatgttaagtgaaataagccaggcacagaaagataaatgccatatgttcttatatgtggaaggtaaaaaagttgatcacaatagaagtagatcgtagaataggccaggtgtggtggatcacacctgtaatcctagcactttgagaggcccaggtgggtggattgcttgagcccaggagtttgagatcagcctgggcaatatggcaaaacctcatctctactaaaaatatacaagaaaattagctgggcgtggtagtgcgcgcctgaaaatccagctgctagggagactgaggcacaagaattgcttgaaaccaggaggcagaggttgcagtaaggtgagattgtaccactgcattctagcctgggtgacagaatgagactgtcttaaaaaaaaaaaaaaagggtataagaaatagagagtagaacagaggttactagagtctgggaagagcaggggaaggataaaaagagactggttaatggatacaaaattatagctggataggacgaatacgttctagtgttctctagcactgtaggatgactatagataaaaataatttattgtatattttcaaatagctagaagagaggattttgaatgttcccaacacaaataataaatgaggtgatggatgtgctaattaattactctgatttgattattacacattgtatacatgtatcaaaatattatactgtaccccatgtatatatacagttatgtgtgattaaaataatttttttgaaaaagaaagcggaagtaacatgttttatatattttatatttaaaatataaatattgctcatgatgttaaatattctcaaaaacattagtctcaatgggaagcaatatttgagtatatttaaattgtttaaccacttctgttgttgaaccatcaacagaatattttgatgaactttttttttttttttttgagacagggtctcactctgttacccatgctggagtacagtgatgcagtcatggctcactgcagcctcaacctcccaggtccaagcaatcctcccacctcagcctattgagtagctgagaccacaggtgtgccaccacacccagcttgcttatttatttatttatttatttatgacaaggtctccctctgtcacccaggctggagtgcagtggcgtgatctcggcttactgcaacctccacctcctggattcaaatgattctcctgccttagcctcctgaatagctgggactacaggcacctgtcaccacgcccggctaatttttgtatttttagtagtgatggcgtttcaccatattggtcagactggtctccaactcccgacctcaggtgatctgcctgcctcagcctcccaaagtgctgggattaaggcatgagccaccacgcttggcctaaattttatttttgtagagatggaatctcactgtgttgtctaagctgtgatgacggttttttgtttttttttttaaacggtgtttctccctgtcacccaggctggagtgcagtggcgcaacctccacctcccgggttcaggcatttctcctgcctcagcctcctagtaggtgggattacaggtgtgtgccaccacacccagctaattttttgtattttgggtagagacggggtttcatgatgttggccaggttggtctctcgaactcctgacctcaagtgatccgcctgcctcagcctcctaaagtgctggggttacaagtgtgagcctctgcacccgtcagtgatgaacttctttgaatataaatctttgaccacaaaatcagttatttcattaggttagattcctagattgttaagcttatggttaagatgttaaggataattctatttgcttatatttaagcaaaatgtaaatgttaatctatttcattgtacattgccacaattattttatttttaaatcttccagtttgatgaaaaaagacacatttcactttgtttttttgttttttttttctttttttttttagaccaagtcttgctctgtcacccaggctggagtacagtggtgccgtattggctcactgcaacctctgcctctgagttcatgtgattctcctgcctcagtctcccgagcagctgggattacaggtgcaggccaccacaccctgctaatttttgtatttttagtaaagacgaggttttaccatgttgtccaggctggtcttgaactcctgacctcaagtgatgcagtcgccttggcattccaaagttctgagattacaggtgtgagccatcatgcctgacctgtttttctttgattacttacgaagtgtagcaagctttttgatcattgattattttcatttctaattttataaatcgctgggcatggtggctcatgcttgtaatcccagcacttttggaggctgaggtgggtggatcacttgagcccaggagttggaaaccagcctgggcaacatgataaaaccctgtctctacaaaaaatacgaaaattagccgggcatggtggaggctgaggtgggaggatcacttgggtccatctactcgggaggctgaagtgggaggatcacttggctgcattgagctgggaattgtgccactgtcctttagcctgggcagcagggtgagaccctgactcaaaaaactaaaacaaacaaaaatgtgtaactctcaacttgcattttgcctttcagttcatgtgcattttgacttgcaaaaattttaaaataatgtaattatataattaaacctatattttgcttagttgtttcgaacagttcatgaactgatatattttaatatgtaaccaatatatgatcatagtattatttcgtttttatattttcaccaattttttttttcttttttttgagacggagtcttgctctgttgccaggctggagtgcagtggtgcaatctcggctcactgcaacttccgactccctggttgaagtgattcttctgcctcagcctgccaggtagctgggattacaggcatgcgccaccacgcccagctaatttttgtatttttagtagagacgggctttcacccatgttgaccaggatggtctcgatctcctaacctcgtgatccgactgcctcggcctcccaaagtgctgggattacaggtgtgagctactgtgcctgggctaattttgtatttttagtggagatgaggtttctccatgttggccaggctggtcttgaactcctgaactcaggtgatctgcctgccttggcctcccaaagtactgggattataggcgtgagccaccgcacccagcctatgaatgattttttaatgtgttgtttaatttgatttgtcagtattttgttgaggatttttgcattagtgtttatcactgtgtctatcatctttttttgatgtttctttgcttttggtatcagggtaatattggccttgtagaatgagtttggaactattctcttcactattttttggaataggtcgagtaggattggaattagttcttccttaaatgtttggtagaattcagcagtgaagccattggatcccaggcttcttttttattgtggcttttacttatggctttgatcttgttttttgttttgttttgttttgtttttgagatggagtctctgtcgccgaggctggagtgcattgatgcaatctcggctcattgcaacctccacctcctgggttcaagtgattctcctgcctcagcctcccgagtagataggactgtaggcacgtgccaccatgcctggctaatttttgtatttttagtagagacagggtttcacctgatcttgttacttgttactggtctgttcaggttttggattttttcatggttaatcttggtagattgtatgtgtctaagaatttgtttcttctaggttttccaatttattggcatatagttgcttatagtagcctctaacgatcctttgaatttctgaagtatcagttgtaatgtctcctttttcatctctgattttatttatttgggtcttctctctttttttgttagtctggttaaaggttgtcaattttgtttatcttttcaaaaaggcagcttttcatttcactgatcttgtgtattctttcaatttcatttatttctgctctcatctttatttcttttcttctactaattttgagtttggtttgctcttgcttttctaattctttaagatacattgttaggttgtttatttgaaatttttctacttttttaatgtaaatgcctatagccataaacttccctcttagtcctgctttcactgtatctcacaggttttggtatgttgtgttttcattataatttatttcaagaaattttccaatttcctccttaatttcctcatggacccactggtcattgaggagcatagtgtttaatttccatgtgtttgtatagtttccaaaatttcacttgttattgatttttagttttattgtggtcatagaagatacttgatgttatttcaattaaaaaaaattttaatacttgttttgtagcctaacatatggtctgtccttgagaatgatccatgtgctgaggagaagaatgtggattctgcagccattggattaaatgttctgtaaatatcttattaagttcatgtagtctgtagtgcagattacatctgatttttcttggttgattttctgtctagatcatctgtccagtgctgaaaatgggatgttaaaatctccagctcttactgtattggggtctgtctttctctttggctctaataatatttactttatatatctgggtgctccaggattgtgttcatttatatttataattgttacatcttcttgctgaattgacccctttatcattatataataaccttctttgtctcttttttatagttttgtcttgaaatccattttgtctgatctaagtatagctactcctgctcttttttggtttccatccctttgttttcagtctgtatgcgtctttgtaggtgaagtgtgtttcttgtagtcaacagatcattgggtcttgttttctgttgttgttgttcattcagccactttctgtgtcttttcattggagaatttagtccattaacattcaatgttagtattaataagtaaggacttattcctgccgttttgttattggttttctggttgttttgtggtcttcttttccttcttcccttccttcctgtctttcttttagtgaaggtgattttctctagtggtatgttttaatttactttttatttcttatctgttgtatttttttatttgagtttatcatgagggttgcaaataatatctcataaccattattttaaactgataacaacactgattgcataaacaaagagaaaactaataaaaactctacatactaactttgttccccccacttttaaactttttgtttgtatttttatcttattgtactgtctggaaaagttgatgtagttattatttttaattggtctcttagtctttctacttgagatatgagtagtttatacactacaattacagtgttataatattctgtgtttgtctgtgtacttactattaccagtgagttttgtatcttcagatgatttttattgctcattaacgtcctttgctttcagattgaagaattccctttagcgtttcttgtaggacaggtctgatgttgatgaaatccctcagcttttgtttgggaaagtctttatttctccttcatgtttgtaggatattttcactggatatactattctagggtaaattttttttcctttcgcacttggaatatgtcataccactctctcctggcctatagggtttccactaaaacgtctgctgccagatgtattggagttccattgtattttttaaaattgttatttgtttctattgtcttgctgcttttaggatcctttctttatcgttgacctttgggagtttggttattaaatgtcttgaagtagtactctttgggttaaactggcttgtgttctataactttcttatacttgaatattgatatctttctctaggtttgggaaattctctgttattattcatttgaataaactttctgcccctctctttcactctacctcctctttaaggccagtaactcttagatttgcccttttgaggctattttctgttaatagatcttgtagatgtgcttcattcttttgtctcctctgactttgtattttcaaagaggctgtcttcaagctcaccatttttttcttcttcttgatcaattctgctggtaagagactgatgcattctttagtatgtcagttgcattttcaatccagaatttctgcttgatttttttaattatttcagtccctttgttaaatttatctgataggattctgaattccttctgtgagctatcttgaatttcattgagtttcctcaaaacagctgttttgaattctctgtctgaaaggtcacatatctctgtctctctggaattagtctctggtaccatatttagttcatttggtgaggtcatgttttcttggattaccttgatgtttgtggatgtttgttggtgtctaggcattggagagttaggtatttattatagtctttacagtctgggcttgtttttacccatctttcttgcgaaggctttccgagtattcaaagggacttgagtgttgtgatccaggtctcttgtcactgcatttgtatctacattaggtggcaccccaagtgtagtaaaactgtggctcttgcagactcatagaggtaccaccttggtggttttaggtaaaatccagaataattctctggattaccagggagagactcttgttctctcctcttactctctcccaaacaactggaatttgtccgtctatgctgagctacctggagctaggggagaggttacacaagcacccctgtggccaccccaccactgaaactacactgggtcagacctaaagccagcacagcactgggtctctcgcccaaggcctgtagtaactaccacctggctatcacctgtgttcttcactcaaggccctagggctttacagtcagcaagtggcaaagccagccatgctgtgtccttcccttcagggcagcaagttctctccagccctgggtgggtccagagatgttcggaagccagggcctgaagtcagaaaccttaggaatctatctagtgctttgttctgctgcagctgagctggcacccaagtaacaagacaaagtccttcccgttttttcgtcctctttctgcaaacagaggcatctttccctacggccgccaccaccccagacctgtggcaagcaccacctggctactgccagtgttcactcaaggcccgaaggctcttgagttaggttgtgatgaatgctgccaggcctaggactctcccttcaggacagtgggctcttgtctggcccagggcaggcccagagcctctttgaaaatatgcagtcagaggaaacaaaagaaaaaagaatgaaaatgccatccaagaaccaaggcctggaattggggaccccgagagcctgcttagtgctctacatagcccaaatagtaaagggaactttgtcttgtagcttagtgtctctggtacctaagctggaagctctgtctcccaggctggagtacaatggtgtgatcttggctcactgcagctgccgcctcccaggttcaggttcaagcagttcttctgtctcagcctcccgagtggctgggactacaggcatgcaccaccacgcccagctaatttttgcatttttagtagagatggggttttaccatgttggccaggctggtctgggactcctgaccttaggtgatctacccacctcggcctcccaaagtgctgggattataggcatgaaccaccatacccggcccctttactcctctttcttttctcaagcagaaggagtctctccctgtagccaccacagctgggaatgtgctgggtcatgcttgaagacagcatgtctcagtctcactcatggccccacagcaaataccacctggctatcagtgctgattatttggggcctcatgggtctttaatcagcaggtgatgaatgctgccagggctgagtccttcctttcaaggcagtgggttcccttctggcccagggtatgtctagaaatgtcatccaggagctagggtctagaatggggacttcaggactctgccctctcctactgtggctgagctggtatccaagttgcaagacaaaatcctcttttactcttccctctcctctcctcaagcagagggaaggagtctttcccggagctgtgagctgtgctgcctgggctttgggaagaggtggcacaattactccttggccatgctggctgatggtccaggttcttatcatgagtcaaatgactcgtggggaaatgtagccagaggagcccccttcaaaaaaggagataaaaagcaggagacatttttgttgttgcatatctgagatggggtaagagtagaaatattgatactaagcgtttaagaggttttatttatagctaacttttgttttcaataggtaatatattcacatggttcaaaagaaaaacattattcaaaaagatacatagtgagaagtctcgatctcaccctcagctcccatggacctttatggtctttttcttccaaccttttttttttttaatttgagacgggatgctagcttttttgcccaggctggaaagcagtggaattccggcatgctggaatgctgatcatggcacactgcagcctcagtctcctcagctcaagtgatcctcccaattcagtctcctgagtagctacaaaacccagtcaattttttatttattttttttagttgaaacaatatctcactgtgttgcctgggctggtctcgaacttataggctcaggctggagctcagtggcacaatcacagctcgctgtaatctctgcctcccgggctcaagtgattctctcacctcagccttctgagtagctgggactacaggcacacactaccacacctagctaattttttgtatttttttgtagaggcaggatttcaccatgttgcccaggctgatctcaaactcctgggctcaagcaatctgccctcctcagcacccccagagtgatgggattacaagcatgagccgctatacctggttctaacttttttaatatgaaatatttcaggtcgggtgcggtggctcacacctataatcccagcactttgggaggccgaggcaggaggattgcttgagcctaggagtttgagataagcctgggcaacatagggagaccctatctctacaaataatcaaaaaattagctgggcatggtggttgtgcacctgtagtcccagctactctggggctgaggtgggaggttacttgagcccaggagtttgaagctgctgtgagctgtgatcatgccaccgcactctagcctaggtgacagagcaagactctgtctcaaaaaaaaaaaaaaaaaaaaaaaaattcaaacatatagaaaagttgaaacaataataccatgaagaccatgtagtttaaacaagtgttaacattttgccatatttgtaatatctacctttgttgaataatttgaaaacaagctgcagacataatgacactttataaccctgtgctttagcatgcatcttctaagaataaagaacattctctacctaattacaaataacattaccacacccaagaaaattaaaaataatgccctaataccttctactcagttcacattcagtttcccccagctgcctaaaaaattatttcaaactgttttcttcaaaccagatctgagtaacatttctgcattgcagttggttgttgtgactttcagtctcttttaatctagaactctatccttcccctattttttcccccaagattttggctttttgaagagaccagaccagttttattgtagcaagttccatattctagttctgtcagattacgttttcttgtgatttttcttgttgctctatctcttgaattcctgtgaaggagaaattacgttgaagacttgtttagacctaggttaggcacttttggtaataatacatcataacttagtctgtgtatttaaagttacatcacatcaagaggcataaatgaagagtctcactctgattgttgctgagtttgatcactaggttaagctggtgactgtcacatcttcccattataatggtactcagtttttcccctttgcaattcggaagtaatctctggaatgatcctttggcactgtggtaacctgttttccaacaattttcgatcatgcaaaaatgatttttagcaacctgtgatcgtccttgcctgaatcatttatttcatttggggttgcaaaatggtgattttgaaattctttctttgcttctacatttattaactggtagtcttctgtaagagagctttgccgctctaccgaggatgaacccttctaaaaaggctgtaaattgcttatttctttctctttaattatcaatcttcagaataagtcattaatgtcatagttacctccaatgatgggaagaagtgtttttttttaaagtttttcactctctgagttattgctggagattcatggattcttattcatgatatcaattttagtaattattctcttttggtactcaaattgtctcaaatttgcccagtggaaaacccttaaaactggctcctgtgttcttgtaacacactcctcattagtgtgagtgcttccttccctctggtataacatcattttttaaattcaccttgtaagataaccatttttattggtcttatatttctttctagagtattttagcactagcatgtataaaatattttttctcccctttccccaaaaaaagtagcacaaggtactcaatggtttactctgttttttttctctcaaaaatatatcttggagatctttttgtgtcagtacacagacagcattttccttcttgctgtgtttctttttttttgcatttcatttttaaggatgttctataatttaaatcagtcccattgatggacatctgggtaatttcctaacttttctattacaagcagtgctgtagtgcataacactatacatacgtcatcttatatgatgataagtgtatctgtaggattgctatccagaagtggaattgctaggttaatagtttatgcaattgtaattttttttaagagatgaagtttcactgtgttgcccagacttgagtgcagtggctatttacagatgctattatagctcaccacagccttgaactcctggcctcaagtagtcctcctgtcttagcctctcaagtacccaggattacaggtgtgtgccagcacacccagcttgtaattgtgattttgaaagacattacttaattgctggtgtaccaatttgcactaccgccagcaatgaataagagtgcctgtttcaccataaccttgctgggaacagtaaattatcaaatttttggagttttgctaatctgatgagtgaaaaattgttttttgcttcttttgtgtgagggtaaacatcttttcatatgttgaatgttcgtttgtatttctttttctgtgaattttctgatc

SEQ ID NO: 58551 - DNA, 130263 bp, Homo Sapiens
gatcaatgggaattggcgtataaataccccagctccctcactgccttctcttcccagtctcacttcctcactcttctactggagatcctaggttcacttcacaaataagctacttgtactccaatccttgtctcaggatctgctcccagtgggaggcaggtaagagtccaccttcagtgaggccagccctgccaagtgagtggtcatccggaaggcccactccaagcctggcctcttctcagtagcttaagctactggaacatgatagagcctttgggctgctcaatcagaaaccatctctattcccaggcactcaaactagaagacctaaaaagcaaacttactttcccttaaatcttccctcaccacctagggactcctccagggtggctgtcaaggcctcttgacagagcgcagagatgacacataagttccatttcaagtgccacctctgatcaattaagagaagctaccaggcttctgtatccaggcttggggtatgcagatataatcagtaatgtctgcctttaacactggaacgggtgagcagtggccttctgtctgcccccaccgccatgtctctagaagcaaatgagttccttcatggtgaagatggctcaatttttcattcacattccagagattgcaaagctatctctgtctcttgctgagctactttcttcatctacttgccccttcccagacagcaagcctatgcagtgagcatggccacccattttatggatgagaaaactgaggttctgagatgttaagtggctttcacagcatcacagaatttataaggataaaacagaggtttttgaatcagatctatgtgacaccaaagcccccacactatatcttttcatagagaaggcagtagtaaagatctgtaaccaaacggaacagctcaacactcctcctttttgttaagagaagaagccttctgctgactggcgcaaccacccccctccaccatccttcattgtcttctctagccaggtgggatggaaggttctttgggggccaatgaggagccttgccccatcatgcagctgcccccagcactttctctgccaggcctgggcaccaccatctctgctgcaaactctcgtgtccccacagggggccccttgctctcattcattcactgtccctgagcagctgtgtctcagagagggctggaggccccctgggaaagctggaggcgaaattctaactagagcagccatgactggggcacttctaaacctccaagttctggaaaaacccaacagaggccttcccagggtggtgacacagcactcgcacaggcggaggctgcaaatggaggcctcagagtgcagcctagatttgaagcccaccgaccaggcagcctgcccaccaggatttggctcatgctctctcccaagcagcagctcaggccttcgagcacattcccattgctgcgaatctgcacccctgccccagaaagcagcgactccctgctctgagaatccttggggatgggactcatagattcagcctttcccagccacaggtgtagccctcaacctccccttgccctccctgggtagaggctcctagcctgtggctggtgctgttctgtggaatgaggcaagaaagaagtgggcaagcaaagaaggaagggggcaaacccaagagaccttccaaaaggcggggagtcttccctctctgcaaccaggaacccctccccagggaggtcctcacccctgtcagctacggacaatgcgaagatcctgtgggacacctttgaaggcagctagacctgggtttacattcctcactcacaggtgtcttaggtcctattctttagactcagagcccaggatgaggatttgtggaatccctgtgatttatggaggaaatgatctcaggagaaagggatggagggaagcaggatgtggcagaggaagatgttcagcaggggcgtggcctcagtccagcctggcctcagcccaatccaccgggagctctgggtgtaagctgtccacagaattgccccctgagataagcaggacaggcttttgtacccttgtgtcagtcagtcgttgtccatccctggatgatgggagaagggaacatgagtcactaggtcctggacaaggacaatcccattgccagcggaatcctccatgaaagttctcagatgtaagttgttagccactgcaccgtcaccagctggggagggggacactagctgggaaaagggatctagatagggcaccaacatcacctgtcacatcgcgtaagattcagttaactcgtctgtgaaacaagcatgacacttaccaaacagatgtgttgggagggtccacctgaatcaggcaaagcacaaggcccccaacacaaggcagggcctcagggagctactgttcgtactgcttggcgaagtcgttttaataaggaggttagttttatgtatcaacttggctgggccacagagcccagatatttgatcaaacattattctggatttttctctgaggctgttttgatgagattaacatttaaatcagtagagtttgagtaaggcagattgccctccataatgtgggtgggcctcatccaatcagctgaaggcctgaatagagcaaggctgacctaccctcatccccaccctgagcaagagagagttctacctgcagagggtttttcagactggatctgcaacatcggctcttccctgggtctccagcttgccagcctactctgcagattttggacttgctggcttccatagttgtatgaagcaattccttaaaattagtctctctctctctcattatgtatttattctactggttctgcttctctggggaaatctaatacagagggaaagaacaccaagaggtgggtagcccagggctcatgacattggcccaagggcatgttcctatgcaccatccaactatgcttgtaggaagttcgtaatcccctcattcactacttgttctaaagttgaattcttgggaatcaaaatagatccccactctgccagtgtagcctggcatccacctggggagtttgctctccaaatagccccttcaggaacgtaccttgtacccaggcactgcccaccagtccccaccagccctatctctctgcagccttcctgtcctagcctaagatggtagggacacagaagggtgggtcccggggatggagggaagacccaaaagggcggcagttgccagagctcaccactcctgcctactcccggtaatctcaccagggtgctgaggactcagggccatctcaggggaacagggggaatgtgagcaccctcaaatatctccccctcaatgagctcagctccaaaatattctgtcctttcttcctgcaatgagggctcccaacccttccatccaccaccaggactaacaaatgcaccattatgccccaccctcgcactcacaaagtcagcacattagacagggggcaatagtgaccccacaggaagacacacttagaggggactccaggtagttggctggtggaggatatattcttaggctgtgagcttcctagtgttttttaaatagctttgccgatataagttattatctattatctatgtgacctgagaaacaaggaagttctcaggagtgtctcgtcacctcttttggctactagcaaaaggctctgcacccaaaaggatcaaaagaaaaatgtctgagccagtagctgcatcccagctctgtgaaaggaaggggaaaccacattacctgagtacctacctcctatgaatgggactttaaatatggtgttttgtcaaatgcttctcacaaccaccctgggagggagggtaggtatacgcattttagagatgaggaagggggctgagtcatttccacaaggacacaggacacttcactggtgaagtcagaacccagctcattatgtggcatccagtccaaggaaggggcataatcaaccagcagcacctcagaagagggtgtcctgagtatctcattggacagtttgtctctgccactatccaggtgacacaggcactgggcccctggctcattagagttctcattaggacttatcttgtcaactttccagtttatacatcaagctcctagaactttggcaaatgggagtcaagccctgggagtaagtcattgacttctgggcatgccaaggcctaaatttttttaatttttttaaactccttaaattgaaatataatttacatagcttaagtgtacagctcaataaatttttatttatgtctgacatctatcagactagttttgtctcttcttgaatttcataaaatagtgtcacatagtaggactacaaatagccagggccaaacaaaggtagtctttcattcatattattgcttgtatcagcaatttatcctttctgttgccgagtagtgttccattgtgtgaatgtactctaatctgtttgtcaattctcctgtggatgggaccttagagttgtgtccagtttgggactattaaaaataaagatgcttgaaacattctagtacatgcgtttcagctttcagtagactaaccactaatttctttaagttatattcctaggagaggagttgatggaattgtgaggtggacaggaggggactgggcctttcagtcctactgttcgtaggtaaagtgggtgatatgggttgaatcatgtcccccaaaaagatatgttgaagacttaatccctgatacctacaaacatgactttccttggaaacagggtcttgacagatataatcaaatgaagagaaggtcattagggtggactgtaatccaatatgattggtgtccttataagaaggaaattggacccagacacacacagaagagagagccacgtgagacagagacacgcaaggagcatgccacatgacaacaaaggcagagcttggagtgatgctgccgcaagccaaggaacgccactccagaaactcagagaaaagcacagaataggccaggtgcagtgggtcatgcctgtaatcccagcactttgggaggctgaggcagacagatcacctgagttcaggagtttgagaccagcctggccaacacgatgaaaccccatctctactaaaaatacaaaaaaaaattagctgggtgtggtgacagacgcctgtaatcccagctacttgggagcatgaagcaagagaatcgcttgaacccaggaggtggaggttgcagtgagctgagattgtgccattgcactccaacctgggcaacagagcaagactctgtctcaggaaaaaaaaaaaaaaaaaaaaagagcatggaatagattctctcttagagcccggttctgccaacaccttgatctcagacttctagcttcctgaactgcgggaggataaatatctgttgtttctgtccacccagtgtatggtactttgtcatggcagccctagaaaattaatgcagtgagtttattagatattgccccacggtttgccagagtgcaaaccactacattttttcagggaaatctgtggattggattcaggaggttggtggccacacccacatactgccctcctggggatctgcttaagcagccacctgctctttcccaggcaaatccttctctaaaccaccacccttgccctaatgcagaaataaaggactagggagggttaggaacttgcccaaggtcacacagctggcaagcggtgaggccaagacttgaactcaagtagaccgattctcaagcccagatgtttatgacacttgggctctgaaaaggatccccacctgacaccacccaagcaggcagctggcgggcacctcctcccagccccatccctgctggctcgcctcccactccatgctatgagtcagagcaaccagagactttatgagcccaggaatgggccaactacctgataacctgattatgcaaaaagccacatgtgaaattcccgccctcataaccacgtaatttacaaggaaatgagtccaccttctccccagcctttggctgcctgcccttcatgaaggctcagtggagcttttcaggccaaagtaggaaaacaaagaagaagggctctatcctggcccccctcctggtctctgagagcccccaacactcgtcagtccacctcccagactggagtgcagtggtgcgatcacagcttactgcagcctcacctccagggctcaagccagcctcccaggtacaggtgcgtgccatcacagcggttagtttctatatttttagtagagacagggttttgccatgttgctaaggctggtcttgaactcctgggctcaagtgatctgcctgccttggcctcccaaagtgctgggattacaggtgtgagcctccgtgcccagcctcctttctgtcttggcctctgcatattcctccaggcagtggggacccgaggagtgggaggctggaaggagatttgaaaaggagaatcagggacagccaaagggaaaagggagagaagaggatgctgaaattaagagatcaatagcgggggactgggcctttcacctcctactactcagaagcttggcctgagacaaaactcaccaaatgaaatagcaagtctgtcccctgtgtcctggaacaccagacccaacagtgaggctgggtccagagtgggatgatggccactgctgaccagtccacaaggcagctatccagccccttttaacgatctcctctagcttttagggtgagagcttctcatttttctcagattctctccaacctctgcctctatcattgtttcttctttccctgtgctccttaggagcatttaccatgtgtcagacatggtgctggggacagagaaatgagtgaggccacacacagtccctgcctcctggagtctacaattaagtcttccattttcctctttttcctgaatgccaatgctccctgtggttcagtctgcagcattcgtgtcctctctctctctctcgctttctcttctgaaagcaaatatttttccctctttttctttttatgatctttgtttttaaaaaagaaatttaatggataagttaaatttcctctttctcccagagttcatcattctcctgattagtaagaatatagcacctactatgtgccaggcacctgacacacattaactcatttaatgcttcaaacaaagcaggtaggcactattgcaccattacttgctcccagtacctccttctcctgctgcccttgctctggatcactgtgggtggtgtatactttccctaccccactggaatgtgggtggaagcaatatgccagttctgggccaaagactcaagaaggcatcatgtgctttcagcagccacccatgcatgtgacctctgccctgaaaagaacaagccctggatagttgctggtggagacacgtggagcagacatgaacctaagccacttcctggagcccagtccagcagagccacagccaactcacaggcttgtggatagaaaataactgcttgtggttgaaagccactgagcttaggggttgtttgttacacagcattagggcagcaattgctggctgatacaattggcatttcccatttaacacataagcaagctgaggcctgcagaggttaaataacttctccaagattatacagctagtaagaaaaggaactaggatgcaaatccaagcaatctggctgcaagtcccactactctatattgagtattagcattcccaagcatgctgttacacttttactatatatgtgtgtgtttgtgtatgtgtgtatatatgtttactatgttacatacatatatgtttactatatatacacagatatatacatacataaatgcatatatacatatatacacatatatatgtaaacgtattgttttgcgtgtctttaaactttatataaatggcaacattaggcccggcacggtggctcaagcttgtaatccagcagcttagggggccaaggcaggttgatcacttgaggtcgggagtttaagaccagcctggccaacatagtgaaaccctgtctctactaaaaatacaaaaattagccgggcatggtggtgcacgcctgtagtcccagctacttaggaggctgaggcaggagaatcacttgaacctgggaggcggagattgcagtgagccgagatcatgccactgcactccagcctgggcgacagagcaagactcagtctcaaaaataaataaataaataatacataaataaatggcaacattatatatatcatttggtagcatgcttttttcactcaacatcatgcttttagagttatctctgatgatactcataaatcttgtttattttacctgctgtattccattacgtgaatagatccaacttcctataagatgcacatttcatttatttccagcttttgttttttcaaattatgctgcaatgaacattccttgtctcctcatgcacatgcaaagtttctcttgggtatgtgactggaagtggaattgctgggtcacaggccatgtgtgtcttcctctctatacaatattagcaaattgctttctaaagttttattccaatctatagcagggtgtgagattatctgctactccacatccttgctatagtagaggatactggtgccccacacagatccccttaacaggctggtccacccctggcccagctgctgcatgtgtcagctgctaagggctcccagaaatccccttgctggagaatcacgcttggtcatgggagtcccccgtcttgtaacccctgcatgattccaggcccacagtggacctctatttatctgttttgaatgggatccaaagggtagaaagaagagagggaagcaagagaaagatgccgcagtccccctcttcttgcctggagcctcccaagctccaaggcaaaggaagacaaggggagaggaagaggaggaaggaagaaatgaaggaatggctccaaggaggcggacagtagggaatatacatttcaaagcctatcccctgggcaggtgggctggagagtggaaatgggcaagcctccccgggcaggtgatatcgaaaaccccgtgtcatcccctgctggggaaagctgattctgcctccatcatcctcttgctgacttactccttcatctccttgcctttctatgcctgtgacacctaattccctgagtccattcattcaccttgtttgttcactgtatgcatctccagagaatgttgtcccatgcaaagtagcagttcattgtttattgagagaattaaatgatgaaattcacttggtacccacaggatttttaataggagacaaaaggctttatagaagttccaaattaataatttttccccaagtgttaccaaaccctccatttatactcattgcccacaggcacttccaattatgaaaccatagcccattttccatcacaaacctagtttctctctttttcctctccctgctcacagagccctgctccctcctgtcgttctctgcgatcctagtgccctgggacaggctccacccgccctctgggctgactgcagctccaggccgcactccctttcggcttcatgtgcacattcttggcagccattaaaactcctctctgaaaccacaggctccaccctcaccctgcctctctgcggccctacctcagccaaggacttcctcagaagtagacccacccccctgtcttctccaagctgctgtcactgtcaccatcatctcacttcctctacctccttcccccagacacacacgcacatgcacacaaacacacacagtcacgcatacacacaccacatgctatgtaaccactgaaatatgtcttcctctgtatttctgcattttagtttatagccccttgtaccaccttccccttctcacagcactggcttcctctgggcagatgttgccaactcagagccccttttattctgaaccctggaccatgggcatgtggtggacagaataatgatacccttcaagatgcccacatcctaatctccagaagctgtgagtatattacctcacatggcacaagggactttatgatgtgatgtgtttaagaatctcaagagcctgtaataccagccaaggcgggcggatcacttgaggtcagttcaagaccaacctgggcaacatggtgaaacccagtctccgccaaaaaatacaaaaattagtcgggcattgtggcacatgcctgtagtccccagctactcgggaggatgaggcaggggaatcacttgaacccgggaggcggaggttgcagtgagccgagatcatgccactgcactccagcctgggcgacagagcaagactccatctcaaaaaaaaaaaaaaaaaaaggagtgggaaggccagcacagacagaaccacctttgtgctttggagaatgccctcaggcaaagagatgtagtttctagttacagagcacactgtagtcatgagtcccacgtactgaggtgggtacacgttcagtcagcagtgcctccctccagaaaggaggcatccccctacccttggcctccatacctttcctgcccagagtggaaagatgatgggctctgggttctaattctgacacctgagtaggagtctgtggaaccccatctcagtctgggtttgtctagtgttttatcatgatgagattgatgtaagagatgatactgtgctcaactcaaggcatcacatcagggagtacctaatgtcagtatcaattattactagtaatactaaccttgatcacttgattagggtggtatttaccggatttctccacttttatattttttccttcttaaaacgtttttaaaatttatttattttaaattttgttttattctttataacaatagagatgaagtctcactctattgaccaggctggtctcaaactcctgatctcaagcaatcctcccatctcagcctccccatgtgctagaattacaggcataagccactacacccagccattttttcctttataattaataaaaatacttttagcaactatcagtgaatcttactgcaaccattattactataggtttgcctaatggtgcttttctatttccctcatttttaaacctagttttaaattcttttacactgcagtttcctcatttgtaaatggggatgatcattatacctacctcacagggtcactacgggattaattaacacatatgaaagtgtatggcacatcacaggtgcttagtcaacgtgcttcttttcccagcatcactcaggggaagacctggttcatcagccgcctgcctcagactctttgcctgccctgcttcccttgttcattggtcctctccaagccctgagggggatgcttaacgtccactggaagggattccagagtaaagcgtccacacccacaccacagggagcagaacatctccccgatgagtaaacgagagagtggtcctgtggctgatagtgccctctcacctgatgggcaaagtcaaagataatctgtcaaaggaggaagctatccttgacttagcacaacacagagaccaagagaagagatggaggaaagaaaagacttctcaggaactggcctccagcctcagcttcccaagtagctgggactacaggcatgattgcccagctaattttttttttttttgtattttttgtagaaacaagtttgctgggcaaccagcaagttgcccaggctggtcttgaactcctgagctcaaagcagtccacctgcctcggccttccaaaatgctgggattacaggtgtgagccactgctcccagccaaagtaagatattttgagagagacagagagagaggatattcacataacttttattacagtgctatatcaataggctaaaaaataataatcctataatcatatcaattgatacagaataaagcatttcacaaaatccaacactcatttatgattttttaagaagtcaattttttaaattgggaaaccaacataataaatctaaacttattgaaaaatgaaatcagtaactaatcttctctgtttcattccaactttagtatatatgcttccaaagtaagaactcatttacgattttttttttttttttttttttttttacagctatcacgggtgattttaattttcaactttaggcttccattttcaaattccacaatgaacacataaggtggagttctggtttcaacacacacacacacacacacacacacacacactcctgcctcctagtgggcagagatttttgttcacaaagaatcttctgccaaatgcctccgaggtacacgtaggtcttggggagcccatgggccaactgttttgtgggcactcctgtcttcggtaggcaggttcttcagagctttgagacctccacaaccttgcgctgctctcctggggcagccttcatgcaggggtgtcctgaggacttcccagggcacccaacttcagcactgtcatccagtgtgcgtttcacggaactttttttcccaggagaaataactttatttgaactgagagctggagaatgagacaaggacttgagacagcatgagtagaggtgaggttccaaaacggcagtcagagctcatccaccaaacagactccactttcccagcaaccttgcagttagtgccaccaacaaaaggtccactgggaaatatatttgccacaaaattacccaagtatgccaacattacaaaaaagatacagatttttcatcgtaattaaatttccacaaaacccccaaatcacaagtgttttgttttttttttttgagacggagttttgcttttttcgcccaggctgtagtgcagtggcacaatctcggctcacagcaacctctgcctcccaggttcaagcaattctcctgcctcagtctcccaagtagccgggactacagtcgcccaaaaccacattgtggggaaaagaaagagagatcagattgttactgtgtctgtgtagaaagaagtagacataggagactccattttgttccctactaagaaaaattcttctgccctgagatgctgccaatctgtaacccttcccccaaccctgtgctccccgaaacatgcgctgtgtcaactcagggccaaatggatcaagggctgtgcagggtgtgctttgttaaacaaatgcttgaaggcagcatgcttgttaagagtcatcaccactccccaatctcaaaccactccccaatctcaagtacccagagacacaaaacactgcagaaggccgcagggacctctgcccaggaaagccaggcaccgtccaaggtttctccccatgtgagagtctgaaatatggccttgtgggaagggaaagacctgaccgtcccccagcccgacacccgacacccgtaaaaggtctgtgctgaggaggattagtaaaagaggaaggaacgcctttttgcagttgagataagaggaaggcttctgtctcctgctcatccctgggcaatggaatgtctgggtgtaaagctgattgtatattccatctactgagataggagaaaaccgccttagggctggaggtgggacatgctggcagcaatactgttccttaaggcaatgagatgtttatgtatatgcacatcaaaagcacagcacttttttctttaccttgtttatggtgcagagacatttgttcacgtgtttaccttctgacctccccaccattatcctattatcctgtcacgcccgataatgagcaataaatactaagggaacgcagcagccggggctggcgtggatcctccatatgctgaatgcctgtcccctgggcccctttttcttttttttttttttttttttttttttattgatcattcttgggtgtttctcgcagagggggatttggcagggtcataggacaatagtggagggaaggtcagcagataaacaagtgaacaaaggtctctggttttcctaggcagaggaccccgcggccctccgcagtgtctgtgtccctgggtacttaagattagggagtggtgatgactctcaaccagcacgctgcatctgtttaacaaagcatctgtttaacaaagcacatcctgcaccgcccccaatccatttaaccctgagtggacacagcacatgcttcagagagcacagggttggggataaggtcacagatcaacaggatcccaaggcagaagaatttctcttagtacagaacaaaatgaaaagtctcccatgtctacttccatccacacagacccggcaaccatccgatttctcaattttttccccacccttcccgcctttctattccacaaaaccgccattgtcatcatggcccatccccaatgagccgctgggcacacctcccagacggggtcgtggccgggcagaggggctcctcacttcccagtaggggcggccgggcagaagcgcccctcacctcccggatggggcggctggccgggcggggggctgacccccccactaccctcccggacggggcggctggccaggcagaggggctcctcacttcccagtaggggcggccgggcagaggcgcccctcacctcctggatagggcggctggccgggcggggggctgtcccccccacctccctcccggacggggcggctggccgggcagaggggtcctcacttcccagtaggggcggccaggcagaggcgcccctcacctcccggacaggcggcggccggaaagggggctgaccccccccccacctccctcccggacggggcggctggccgggcagggggctgaccccccctcccccctcccggacggggcggctggccgggcggggggctgacccccccacctccctcccggatggggcggctggccaggcggggggctgacccccccacctccctcccgggcggggcagctggccgggcagaggggctcctcacttcccagtaggggcggccgggcagaggcgcccctcacctcccggacggggcagccggccgggcggggggctgacccccccacctccctcccggacggggcggctggccgggcagaggggtcctcacttcccagtaggggcggccgggcagaggcgcccctcacctcccggacggggcggccggccgggcggggggctgacccccccacctccctcccggacggggcggctggccgacccccccccccacctccctcccggacggggtggctgccgggcggagacgctcctcacttcccagacggggtggttgccggacggaggggctcctcacttctcagacggggcggttgccaggcagagggtttcctcacttctcagacggagcggcggggcagagacgctcctcacctcccagacagggttgcggcccagcagaggcgctcctcacatcccagacagggcggtggggcagaggtgctccccacatctcagacgatgggcggccgggcagagacgctcctcagttcctagatgggatggcagccgggaagaggcgctcctcgcttcctagatgggatggcggccgggcagagacgctcctcgcttcctagatgggatggcggccgggcagagacgctcctcactttccagactgggcagccaggcagaggggctcctcatatcccagacgatgggtggccaagcagagacgctcctcacttcccagacggggtggcggccgggcagaggctgcaatctcggctctttgggaggccaaggcaggcggctgggaggtggttgtagcgagccgagatcacgccgctgcactccagcctggacaccactgagcactgagtgaacgagacttcatctgcaatcccggcacctcgggaggccgaggctggcggatcactcgcggttaggagctggagagcagcccggccaacacagcgaaaccccgtctccaccaaaaaaaaaccgaaaaccagtcaggcgtggcggcgcgcgcctgcaatcgcaggcactcggcaggctgaggcaggagaatcaggcagggaggttgcagtgagccgagatggcagcagtaccgtccagctttggctcggcatcagaggggggcgggggagggagagggagctcatttacgatttttaaaaactcagcaagttaggaatacaggggaactatctcaatgtgattaaaaaagcatctacaaaacctataactaacatcatacatattggtgaaagactgaatgcgttccacctaaaatcaggaacaaagcaaggatgtctgctctaaccactcttactcaacatattagtggaaattctagccagtgcagtaagacatgaaaaaatgcatacaggttataaaggaagaaatgaaactgtcattatttgcagaagatatgaggatctacattgaaaatttcaagaaaattcccaccaaaaaaacctcttagaactaataaatgagtttattcacaacgcacaacatcagcatacagttttatatgctggcattgaacatacagaaactgaaatttaaaacccaataacgttttcaatcactcaaaaaaaaaaaaagaaaaacctaggaacaaatctaacaaaacatatataggatctgtatgataaaaatcgcaaatgctggtaaaagaaattaaagatctaaataaatggctaaacataccttgtttacattttggaagagtcaacataataaagatataagttttcccaagatttatctccaagtttaatacaattcctatcaaaacccccagaaagggtttttatagacacaggctaatttattctaaaatttatattaaaaggcatggaccctagaatagatatagcaattacgtaaaataagaataaagtaagaggaatttcaagagttattatatagctacagtaatcaagactgtgcaatattggcaaagggatagacacacagatcaatggaacggaatagagaatccagaaatagatccacacaaataagccaactgatttttttacaattttttttttttgagacagggtctaactctgttgcccagtctggagtgcagtggcatgaccatggctcaccgtatccttgacctgcttggcttaagcgatcttcccacctcagcctcctgagtagctgggactacaggcacacaccaccacacctggctaattttgtttattttttatagaggtgaggtctcactgtgttacacaggctggtctgaaacccctgagctgaagagatcttcatgtcttgacctcccaaagtgctagaattacaggtgtgagccccctgcccagtgccaacggatttttgacaaaggtgcaaaagcaatccagtgaaggaaggatagccttttcaacaaattgtactgtaacaattggacatccaagggcaaaacaaaacagtgaactccaaccaaaacgtgacaacttatacaaaaattaactcaaaatgaaacatgaacttaaatataaatgcaaacattttaggaaacaacttaggggaaaatcttcaggatctagggctaagcaaagagttcttaggattaacagcaaaagtgcaatccacaaaaggaaaattggataatttaaacttcatcaaaacttttactctgtgaaagaccctttaagctgatgaaaagacaagccacagactgaaagaaaatatttgcaaaccacatgtttaacaaagaactattatctagaatacatacagagctctcaaaactcaaggggaaaaaaaatcccacaaataatccacttagaaaataggcaaaagatatgaccagccatttcactaaatagaatatacagatggcaaatagagataagaaaaaaaaagttcaccatcagtaattacgtgagaaatgcaaagtaaaaactacaatcagttattactacacacctatcagaatagctaaaataaaaagttatgacaataacaaatgctggtgagaatgcagagaaaccagatcactcatacattgctggtggcaatgtaaaatggcacagccactctggaaaacaatttggtagtttcttacaaaactaaacatgcaacttccatgtgacttagcaattgcactcgtggacatttatcccagagaaattatattcacacaaaaacccatatacaaatgttcatcactatcttattgtgttgactctttgtaacacttaaaactggacatgatccagatactcttcaaaaggtgaatggttaaacaaactgtggaacatccataccctgtaatactactcagcaataaaaaggaacaaactactgattcgtgcaacaatttggatgaatctccagggaagtagtatgctgagtaaacaaagccagttctcaaaggttgcatacagcatgatttcatttatataatattttgaaaggacaaaattatacagatggagaaccctcattcatagttgccagttagggaaaaggcgggtcgggagggaggatgcaggtgtgattataaaagggcaaggctgggcgcagtggctcgcgcctgttatcccagcactttgggaggctgaggtgggcagatcacgaggtcaggggtttgagaccagcctggccaacatggcgaaaccccgtctctactaaaaatacaaaaaatcagcggggtgtggtggcacgtggctgtagtcccagctacttggggggccaaggcaggagaatcgcttgaacctgggaggcagaggttgcagtgagccaagaccatgccaccgcaccccagcctgggcgacagagcgagactccgtctcagaaaaataaataaataaataaatataaataaattaaaggacatcacaaaagatccttgtggtgattgaactattttttatctcaactatggtggtgattacacgaatctatacatatgataattgcatagaattaaatacatgcatacacacaagtcctataaaactagggaaaatggaataagattgacgttatcagtgtcaatctcctggctatgatactatggtatagttatgcaagatgttaccattgggggaaactgggtgaaggctatacagaattgttctgtattatttcttataacttcatgtgaatctaccattgtctcaaaattaaaagtaaattttaaagaaagttcattagaaagaaacctagaggaatataggtgtagacaatataacggatttgaaagaatgcatttgagagcaagcattcacccacatatacagaataaatccccaaactcagtagtaaggagagtcacatgatggtggatgtctaaggaaaagagcttgggccgggtgtggtggctcatgcctgtaatcccagcagcactttgggaggctgaggtgggcagataacttgaggtcaggagtttgagaccagcctgactaacatggtgaaatccccatctctacaaaaaaatacaaaaagtagccaggcatggtagtggacacctgtaatcccagctactcaggaggctgaagcaggagaattgcttgaacctgggaggcagaggttgcagtgagtcaagattgtgctactgcgctccagcctgggcaactctgtcttgaaaagaaggaagggagggagggagggaggaagggaggaggaaggaagggaggaggaaggagggagggagggagagagggaggggaggggaggaagggaaagacagaagaagagagaaagacagagagatgagagagggagaaggaaggaagggagggagggagggagggagggggaaagagagaaggagagagatgagagaaagagagagggagaaggaaggaaggagagagagaaagagaggaaggaaggaaggaaggaaggaaggaaggaaggaaggaaagaaggaagaaacccattcaggtttgggggatgtaagtacagtgagaaccctggatagagcttagggtggcagttagactcccaaatagagatagctgtgtgcacatgaggcaggttgagacagccttgccagggctgccaagagccagcaaagtgtggaagtaaaagaatgagttgtgcacacctgagaataacccaaaaataaagaagtgccttagataatctactaagttcccctggcccagcacaggaccttggaatacactgggcgtcaagaggcacacaggagcggcagccagcccccaaggaatcacacaatcctgggtgtggctggagccagcgaggatttctgtgagctgactgccagagacaggatacaaagaatacactgtgagctgactgccagagacaggatacaaagaatacatctcagtggtaaactaaaagctttaccaccatgcaatatatccatgtaacaaaactgcacttgtacattttagatgtataaaaaataagttaatcgcagggcgcagtggctcatgcctgtaatcccaacactttgggaagccgaggtgggtgggtcacctgagatcaggagttcgagaccagcctggccaacatggcgaaaccccgtctctactgaaaatacaaaaattagccaggcatggtggcatatgcctgtaatcccagctactcgggaggctgaggcaggagaattgcttgaacccaggaggcaaaggttgctgtgagccaagatcgcgccactgcgctccagcctgggcaacagagcaagactccatctcaaaaaaaaaaagttaatttaaatattaaattttctttaaagaagcaaagagacccaactgataacacagataaatttaaaacataacattctggctgggcgcagtggctcacgcatgtaatcccagcactttgggaggccaaggcaggtggattgcatgagcccaggagtttgagaccagcctgggcaacatggcaaaaccccatctctacaaaaaataataccaaaattagccaggcatggtggcgtgtgcctctggtcccagctacatggggatccttgagccctggaggtcaaggctgcagtgagccataattgtgccactgctctccaacttgggctacagggcaagaccctgcctggaaaaaaaaaaaaaaaaaaaaaaacaaagacataactttctgaataatagaacctaaacaaatcaattattctcattattcacaagttggatttagcttctgttatatcctttgtctttgcttgaattgagttttgtattaataatcgagggattgaatatggactgtatgagcttgtgctatttaaacattaagttttacatgcaaagcacccttgtaaaccataaatacagtgaaaatctaagataaatgtttttaaaagtgctttgcccatcctatatatgaaaagtagcctttaaaattggcctattgagaagaaatccaggacttttctctctttatccagcagaatgaatttaagaatttatagtatatatttgcttcccttcacatacaacaataaaaatatttgggttgggttggaagcagctgacgctgccagtgtcttacacatcacccttggcattcgcccctgcacatggaaagctgcttaatgtgaacatctgttgctttctgcctgggggcttttatttctagtcacaggaacatgcttggtctgtgcacagggcaagccagaagtgctggagagtgaaggccctaagaagtagcactcaaccactgatggacagggagttggtagataaaaatcccagctttttcgctccttgggctggatagagctgagatgtgtgctctgcactggatcccagagtctccagcagggtgagcttgtttcccacagtggtagcttgcttgctgacatatcctgtattggcttctttcccttccctgtctcactccgctaactggtgcttcctgagatcacctcccacataaactacttgcacttgaattcttgtcttagcatctgctttgggagagaactgaaaacaagatcagtggtaattgctggttagtgcataaaactaaatgcactgtgttaaatgaaagaaaccagatctgaaaggcttcatactgtatgactgcatttatctaacgttctagaaaaggtaagactatagggagggagaaaaggtcagtggttgacagggttaagggggaggcaagaggctgactgcaaaggggagctatgagagatttttggggggtgatgcaactgttctgtagcatgactgtggaggtagttacatgactctgcattttcaaaagccatataaccgtatacagtgccatgaagaatacatgtcactaaggcacaatagccttaaaaatacatgtaattcacttagcctatccttgacatgtagagaggataatcctgagatccagggaggaaaaatgacatacccagatcttatacctacttcaagagtaagtcaggactagaacccaagcctcaacagtattaggccagtcctctttccaacagtatgtgggatctctgtcctttatctaatttacctcaaaagtctgtgcttctaacaaaaagtggctataaagatggcaatatgacagtagtcactttggtgatgacagtctttaacatatctatctcttgagtctctctgctccaatcctccaagtttcatcatctcagcctcatagggattcctcatccctctcccctgtgttggatctcccatttcccacatgttgtgtctttttctttgggttactcccttggtttggtggagcacatccttaaattacttcccagaaaaggaaacatgggatgtgcatatctgaaattgtcttcattccactcatttcttgattgtttcactgtatatagaattctagattggaaacaatttttcttcagaattttgaagatattactctagtattctaccttccagtgttgctggaacaattccagtgaagagaagtctggagccatgctgattcttaagacttagtatatgacttattcttttatttgttcaagcttgtggaatcatctctttatccttagggctgtgaaatttcacaattatgtgccttggttaaactaggcaaacggtgagcccttttgacctggcaatttatgtttttcaatttgggaaatttttcttgaattatcacattgatgatttccttccctccttttctgaaatgcttgttattcagatgttaaaccttttggactattccccctacattcctcatcttttctttcctgtttttcattgttttgtctttcagatctattttctgtgagatattctagacatttttctcaagccatccattgaatttttcatttctgctgttgtgtgtatgtgtgtgtatgtgtgtgtgtttattttaaagcttattttttgtttcttgtctcaaaatagcatcttattcttgtttcatgggtgtaatatcacctcttattctttttttttttttttttttttttttttttgcatcagaaagccttatttccatttggtccaaggcttgttagggtagttaagaaagctgcctattggctggagggagaggcttaggcagaagccctattactttgcaaggggcccttcagaagtcgctgggctcataaggctcttagacgtgcttgagagtgagcctttcgaagagatactcgcccagcccagcctctgggcctcccagcctgtggaggttcgtcaggtggtcacccatcttcttgatgagcttcacttcctcatctaggaagtgagtctccaggaagtcacagagatgggggtccatgtgggcagaatccagggcatgaagatccaaaagggcctggttcagctttttctccagggccatggcagctttcatggcatctggggttttaccccactcatcttcagctggcttcttgatgtcctggaagagagcgcggccgccacgctggttttgcatcttcaggagacgctcgtagccctcgcgcttctcctcggtcaattcgcggaagaagtggctcacgccttccagagccgcatcatcgcggtcgaaatagaagcccagagagaggtaggtgtaggaggcctgcaggtacaaattgaccaggctgttgacggctgcctccacgtcggtggaataattttgacgaatctgggagctcatggttggtcgccaagaaggagctaacgacaaaaacggtgctggcaggtcccagaagcaggagatagccgagaagatggtcccggaggttgcaagtggagaggaaattggagggcggtcggaggctggaagaccgtccccggatctgttccgtccaaacactgttgaagcaagagacagacccactggaccgccgaactgcctatcacctcttattcttaaaaataaatcttggtttcctccaacttgcctttttctgtttattttaattattagtttgcttgcttgttttgacttgtttttattgttatttattttctatcttccatgttagcagctttcctcagatatttggtaatctggtaatctacagtagatgttattggtgttctgcccataccttcagctgctataaatctcggtcataaatagaccagagctgccactttatctaaagaattgtcctcaagtaggaactaccttgcctgggaattcatggcttcctccctggcagcccacagccagtgattgatcaatatatggatacaaaagctggccctcttgcttcaaggtgagatcaaccctgtggtgcaattcatgctccagggctccctgtgggtcagactgaggctagactccagccaagaccacatccttgctcagttcctttccatgctctttctggaggtggaaaaaggagcttcttctgagggcccgcccgcaataaatcgcatgcatctgaatctgcatcacagcttctgtttctagggaacctaagacataatctttagctctctgctcttgattaagagtaaaggactatgaaaaaccctgagtgcaggaactgggcttgtcaactgtgattcaccgtagggagacatggatggtcgtttactggaaatctgaatgccagtatccttcattctttcccttttggctggtcagagtgctcagagaagagaggtggagagtagctgccagtgatttgggaagtgatcagagaagaaagctgaggttctcagcatgcagtgaggaaatagtcacttaacgcccctgttctccacatgccacctttgtcctcagccacgcctggtgccccagcccagagatcctcctttttactctctccggaggtgaaatctccagccctctgcctgatgagagagagaaacctgctgctcggagagtggaagaggggaactaagattttaactgcttcccaatcacctttcacccagttatcctgattctttggcttgcccagtaccagagatatctaggactgccaattcccatttttttttctgtttttctttctttccccacccccccttggattttgccatgaaaatagggctactcttaactttccctgggtttcagctttcttggggctgctgagtcgattaccactcacccatctgttttctatcttccaacttatttttcccccactattgtctactctgttctctctgtcctcatgagtttgtgtctttaaacaaaatccctttataatagttttagtgagttttgggaggagcaaaagtagatgggtggattcaatgcaccatcttaacctggaaaaaaactccaatggtattagggagatgtctcctccctgcattcccctccttgtgagcccctttggatgacagacaggcaagtgagaaactaagtaatggaaccaaaggcctgggatggaagccgtgtctccccatggacaatgctgttccactacagaatccaagcttcttccctcagtcatggcctgagtcagcctttgagggaataaagggctggagtccagattatgatggcgtaggttggaagggtaggaagccaagaaaaactaaggaagcctgcctggaggaagcactgcagcagcaggaaaagcagaagatacagagtctctttatctgcatggtgtccttatctcccaaatgagagaattcatctcttccaactctgcatctatgactctgtggggataaaagtcactccagaaagcctgtctgctttcttgccctgttcctctttcccgtctgttgctttgggatgaggtgataatgattgggaactatttgggtagattggataggttgaaatggaggaaaaagaaaaccagcatagttcctttttcctagaatgagttatgggcaaagatatatcattccactttattcctttctctttaaagctcaggcctaacagaacctagcagagagaaaaggcagtgatataattggctgggggaaattggaggggcagaagctgtgatgatggtggtagccaaatggtggtcacagctgtgggggttgtgtaatcaataactggaggagcttagcagagcggcttgctttgttccatagatgtaacttgaaagtaccctctgggaggctgagctgggcagatcactcaaggccaggattttgagaccagcctggccaacatggcaaaaccctgtctctactaagaatacaaaatttagctgggcatggtggcacacgcctgtaatcccaactattcaggaggctgaggcacaagaatcacttgaacaaccaggaggcagaggttgcaatgagtctagatggcgccactgcactccagcctgggtgacaagagtgagactctgtctcaaaaaaagaaaagaaaagaaaagagggccaggcgcggtggctcatgcctgtaatcccagcactttgggaggccaaggcaggtggatcacgtgaggtcgggagttcaagaccagcctgaccaacatggagaaaccccgtctctactaaaaaaatacaaaattagccaggcatggtggcgcatgcctgtaatcccagctacctgagaggctgaggcaggagaatctcttgaacccgggaggcggaggttgcagtgagctgagatcatgccactgcactcctgcctgggcaacaagagcgaaactccgtctcaaaaaaaaaaagaaaagaaaagcaaccaagacactgaagtcagtggagaaatactctggcctcctggtcatccaggcagacaatgctgagggctgttctacaaggtttctcagtggacgccaagccagactgagcctcagttgcccatggcagtaactggcccatcagcataccttactgttggcttctctccctttcacagcttgctttccccatttcttcactcttatttcctggaatcacctcccaagtaaattacctacatccaagcccttgtcttaagatctgttcttgggagaatccacgctgagatgggtatcctccaatctaaaagtgagtctgagcaggttgttccacccctgggaaatagtgcttccagtctcctgcatgtgtggctggtctcagctaaaaagctcccacatgagatcttgagaacatttatattttcaggagttctgggtgattgggcttgtgtgtgccagaaaggcaacggggcttgttggtggctgggtaaacagaatcccaggttcccacctccttcgctggcttgtgggtggacacacagccagtcctaaaggtaccatgcacacagaaacctacgctttctccccaactcttgctgtttcacagtcttgcacacacattctgcattaagaagcaattccggtggctcatgcctgtaattccagcactttgggaggccgaggcgggtggatcttgaggtcaggagttcgagaccagcctggccaagatggtgaaaccctgtctcttctaaaaatacaaaaattagctgggcgcagtggcaggtgcctgtaatcccaactactcgggaggctgaggcaggagaatcacttgaacccaggaggcggaggttacagtgagccaagattgcaccactgcactctagcctgggcgacagagagacttcatctaaaaaaaaaaaaagaagaagcaattccacccctccgtgggcagcgtcacgccccagcaagaggtccccatgggctatgaggaggagagggccattgggagggatcaaggcaggaggagtcactttggaattcttggatgaagaggctcggggaacacagaacatctcctcctctactggcacagtccaacgggtcaaagcattatatgatcaacccttaaaggggtcatttagaactctgaataattaagctttcaaaggattgaccagtgggagggatgtttttctgaaatcgtgccatctcaacagatggggaggatggacagaggaatggggctataggcaacctttgatttctagcttctgtttgaaagactgattttgtcttgaccagtcaggcattcattcaacaaacttgtattgggcacctgatccaaagatgactaaaaccagcccctgttctcactgttccaaaattagtcagacgtttgatttaaaagtagttgtgatttcttttccaggagtcttgaaggacttctgaccatatgggtagggacaattttctgagatggatttggggtgaggacattgcttaaaaggaggtataagggctgggcgtggtggcttacacctgtaatcccagcaatttcggaggccgaggcaggtggatcacctcaggtcaggagtttgagacaagcctgaccaacatggagaaaccccgtctctactaaaaatacaaaattagctgggcgtggtggcgcatgcctgtaatcccagctactcaggaggctgaggcaggagaattgcttgaacctgggagatggaggttgcagtgagccgagatggcgccactgtactccagcccaggcaacaagagcgaaactccatctcaaaaaaaaaaaaaaaaaaaaaaaagaggtataagggaggagatgggaggggactgtggggaggaaggataaagagaaagaggggcatcctccgaaactccaaacagtgaagtcttccctaccctacccctacccatcatgtggaacaaggaaaatgttagctgcgaagccaccacttcaagtcctagctgcctgctgttttgaggtacccacctaaaccctccagagaaagaattgcccacccacactctcccatcacttgcattttgcctagaccagtgggggctgggagtggtggggggatgagtagactcatgtgcatcactaagcaaagaggatcagggactagcaggtgaacctccagccggaagcaccaggaggacaaaaactgtgatttcttccttaaggggaacacgggacaacccgctacaggggacagaagagcaggatcctgccatatgttgtagaaactgtgaggccagattccacctgtccagtcccaaaggaaaactttctccttgaccctaaaaaccagttgggccagttgatgacacagcaaaattttaataagatgagtctccctgaaaacagcaactggacacggcccctcctccttccgttcattctctcattctctttcccactcacccctaattttttcaagaacaaaagacatgaaatgagccactccatcctctaccctacagcctgattggactagtgaattactagccaagctttctaaacaaacaaacaaaacaggtttccaaacgcagggcagaggaaggaagccaaaataaggaagaagaaagaaaaggagctcagcctttccttctcctgtggagcctccccagcccaccagggaacatcacctccaccaatagccacagcagacccactatgtgccagtcacatattaggtcctgggagatactgatcctgctgatgaaggactcacatgctggtgtggtaagaaaatatgcaaatgagcagggaccttggagggtgcctagtgctgagagggaagtgggtacagggcacaggtggggattctcaaggaaagtctgtcaataagtgggggcagaaaaaaatactttatcaaaaatgactttgtaaatactttacttttttttagagcagttttaagtttgccacaaaagtgagaggaatgtgcagagttcccaactagcccttcccccctacacatacatagcccccccattataaacattctcccacgggagcatttattactattgttggacctacattggcacatcattatcacccaaaatccatgtttacattagagtttgctgctggtattattcattctatggatttagacaaatgtgtcatgacaggtatccaccattatggtatcatacacagagtattttcactgccctaaaaagcatctgtggattttcagagaaaagagcaacttttgcatgctaggtaagtattgctttcctagtaggggaacagcaggaaacagcagtcaccttggtgactactgaggtgaaacaccatggtgctgttctgtaaatggctggaaaataaggctcaaggagccagatggggcagggaaaaagaaaaagacagaaacacaggcagatttgaataccatgagaatcgatttgcatgagaatggattgagacttctgcaacagcccaggggagagatgagggggctgatttagaacagtgagaggtttgagcaaagcaaagttgaaaagaccctccaggtaactgctatgattgacagcaaggagggcagtgttcccccagcacagccctggcacaggcagctctagaggaagcctgggtctcccactcccttccttttgccacagtctccctagcacatgcctccacccttctctcactttgggggactgtgaccattgggtggcaggtgacttcttgagaaattcactaatgtttccctctttacttcctccctgccttggtggttaatggtttgccaaagcagaaggaacatgcctctaggcgcttgccatgatgacttttgcttcccaaagttaagctactgagctgtttatggtttatgtgatggggcctgagagattaggagaaggaaggagaacttctgggggacacatggagactgaggaagagggggcaatcatttttgcaagctctgagctgcagcgcacacacagtcagctgtggagcttcacagccattccctctgcaggctcctagcctctccagaaacttccgtaccccaggagtggcagacacaaggcgatgggaacaagagagtatctgcagaatacactgcctgctaaagacaagagaggactccccagatccttgccttggtattgcaggaagagctcagcctcccaaaatcggaggtcaatttattgcctgccctgtagaatgggagccggaggttgaggagtggatgtaaataaaggaatgcactgtttcttgcacacacctctctccactatctgggcagagtctaggtctcatccatcaccaaggttctagcactcagctgagaggctgcagcaggaggggcagatggaggagggtgcggtgcataccatctccccatcaaaccaatgggcaccacgtgaccattcttgtgtctctggggactgtcaatctgcatgctaggaaaggggtggcattccaatctttcatttttttgtgtgtgagacggagtcttgctctgtcacccaggctggagtgcaatggtgcgatcttggctcactgcaacctccgctccccgggttcaagagattttcctgccttagcctcccgagtagctgggattacaggcatgagccaccacacccagctaattttgtatttttagtagagacagagtttctctatgttggtcaggctggtctggaactcctgacctcaggtgatccacccgccttggcctcccaaagtgttgggattacaggcgtgagccactgcgcccggccccatgctttcacttttaaaaatgcttgtagggcacgcaaaaatactaaacggtcgatggagaaggtctgtctggagtagttgttttttttttttttttttgagacagagtctcgctctgtcgcccaggctggtgtgcagtggcacgatctcggctcactgcaagctccgcctcccaggttcaggcgattctcctgcctcagcctcccaagtagctgggactacaggcgcccgccaccacacccggctaatttaattttttgtatttttagtagagacggggtttcatcgcgttagccaagatggtctcgatctcctgacctcgtgatctgcccgcctcagcctcccaaagtgctgggattacaggcgtgagccacctcgcccggcctgtctggcgtagttctaaccaggaacagagccagcggccagggccgcaccaggcctggccagggagcgccgcgcctgcgcactgcagactctgaagccgccgagccctccgccgaggtgggtggggaaactgcccgggcatccgggtccctcaccccgcccccgctgcatgaatgagaggcgcggcgcccgcccctcccccggcgggcccgcccctcgcgaggggccgccgggcgcagtcagccgccgccacctccgccgcgctctgtccggacggacgctcgccgcccgcagcctgccgcccgccgcagggcgctgacggtcccgcacgtctgccgctgccaccggcgcgcccgagtaagtgagcgagcgagggcgggagcgccgcggccgccgcccccgggctggggtttgggggaccgagccgctccgggttcgggatgctgaggagaccgcgggcccgcgccagcctcccacacacacacactctcccggcgcctcggccggccgggcgcggtgtgcaggggtgaggcggtgtctccaggctgaggagggacgcggaggagggtccggcgcggccccgggactggagggtgagtccctcacaaagggcggagcggggctgtcacctggagatcacggagggaaggtgcgtgggcccccgcacgtcctgctcgcccaagccctggcatcgggtccccgggcgtgggaggcggctgggatgagctgggaggctaggaggaggatggcgaggacgctgcccccgcgttggcggtgggcgcgcgccttggggggtgcggcgtggcagtgttttcctggtccccgtccactcctcccctttctttgtggcgcttgtctcgtgccccgttgtcacagtgtgcatggcagtggtcggggtggagacctcttccctcggcttactcattaatgaaagtcaccatctgtgggcagggggcgtgtgtggttccacaggccggagaattaaggaccctcctttgtttctggagacctaatgatgtgtgtgtgtgtgtgtgtgtgtgtgtgtgtgtgtgtgcgcattcaagtgaaagggacatctatgaaatgagagaatcagagattgtcaaaaagggtatgaggaaaaggggaggggatataacttcatcacacctttacccaattctttacctgatgttatttcaaacagttttttctcactgtaaaaccagtgggttttattcattggaaatgtgcatctaaattctcatatatctgtgtttctagaatactttgcctttttgggcttagttaatggtaagattctcatgtctgtctacataggaatactccaccgtacaggacactgctttctgggtttagttcattgataatttgtccgaatgctcataaacatgtctataggaatactccaatatatctaggacacagttttctccgctcctgaatacaggcagattttgtttctttctgcctccctgtgttaatgagaaggtagtccagcaggttctctctacctccttgcttttttttccccttaatgctttggcagagggttttattgcatattaccctggcatgcgcccttgctttgatgtgaattttcctgtgttctgttgtctggttgtacagcccagctcaatggctcctcttacaggactactggaaaacagaacaccttttttcattgtcctcatctccagagagagaaggaagcgctgtaggttcccacaaacgttgactctgtcagactgcctgcctgactttgttgtgttggtaaagttatgaagagttgcagttgttgtagaccaattaaaaagaggctattgggataacaccagctcttccttgctattttggttttaaaacaaatgatatgaattttgcaagatagttgttaactctggttgcatgatgattttcagtttctttttacccatatacttttacagggtgttgggaaattagccactcatttacaagaaacacacctccaaggtatttttattatgggtcgggtgcggtggctcacacctgtaatcccagcactttggggggccgaggtgggtggatcaccagaggtcagaagtttgagaccagcctggccaacatggtgaaaccctgtctctactaaaaaaatacaaaaaattagccgggcatggtggcgagcgcctgtaattccagctactcgggaggctgaggcaggagaatcgcttgaactcccggaggcggaggttgcagtgagcctagatcgcgccattgcattccagcctgggcaacaagagcgaaactccgtctgaaaaaaaagctatttttattatgatctttggattcaaaatagcggttttaaaaaattaagaggcgcttatattggatgatatgaataattgtatgggttctgttttctttaagattctctgtaatatttttaaaaatcacatgtattttaattcctagtagttttcagtggaaaatgaaatgtaaactaagcagtcttccacagcatctgtttatgtatattccctctgtttaaaacatttgcttttaatttgaaggggaaattttccatggtcagttcaggatacattattcttagtaaaattcttaccacgttcaaattcttttttgtaagagtaaaaaaaaattaatgaaagttgatttttcaattggggatgttttggttttaatgcatgatttaaataaaatcttaatatcaattaatttaattcagataagttaatttaaaacaaggcttttatgaaggaaaaatgaagcagaaaaaaaaaaacaagagctttactaactaaagtcactaatgttgaagtaacccagtacatttataaactgcctgtcttgactgcataagacattttttaggagtctccttaaaacaaaccgtaaggggaagtcttagataaacagagtagcataaccggaattatcactgaaataagcttgcacagtatcgcaatttcatggaagtttaattttgcaagagtgacttagctatttttaatatcaacaaaggaacctaaacacagcctggccttgttattcagcattctgttaatcaaagtatttgccaacccatagtttagcattctgtagtatgatgattgaagaaaaaatctaaactaacttttagatccttaaaatagataaaataatgttaagtgctgttttaatagtaaatatttattcattagaatagtaatattatgttagtgatggtaagagcatagatggtaacactttgttaactaggatctattatcctcccagtaatgtctcataataaaaagtaatttatttttccattgagcattctctatcaataattgcttttttgttttttgggtgttttgttgttttttttttttgagatggagtctcaccctgtcccctaggctggagtgcagtggcgtgatctcggctgactgcagcctccgtctcccaggttcaagtgattctcatgcctcagcttcccgaatagctgggaatacaggcactggccaccacgcctggctaatttttttttgtatttttagtagagacggagttttgccatgttggccagactggtcttgagctcctggcctcaagccatctgcctgccttagcctcccaaagtgctgtgattataggtgtgagccaccgcgcccggccaataattgtttattgttttaaatgggagtttattctaagatcagtaataatgctattacaatgtgttagcttgaatcatatgaaattgccatgttgagactgagaaaaaatcaaaatcagcagtcttatatattatatagttaaaccactctcaactcttactggtttcttttggtatttacctttatacttatttcatttttaatgtttatactgctatttcttagctcttcacttttggatattctctgtggacttctattttggaagttgaagacttaactgtctcacataactatccttccatttcccactcatacttgacagttaggtcggtattcaggatttatatgactgacagtgtacctgttattcacagttgagccacgtagggtgctattactgtgttttcttcttgaacaacttttgttgctcctgaattaaataattgcctcttttgtttgtttggttttcatttgctgagttttctttgtatcagtcactaattcattcaaactctatgacaaaactgattatctttgaatattctcaggtagtcactcactttcatatcttttccccaggagatggtcctgctggagccccctctctcctactccagtctggaattgtttgctccctggactactgcatagccatcatcctgggacttccctttgtcatcatcttgggaattccctttgccttcctcctgtgttaggtcttctatttcctggaccctgtgtcttccttattcttgagtagcttcctgagaaagggtacatacaaaatctgaaattccttcctgaattcagaagttacatgtctggaaatgccttcattttaccttcactcttgaatggtagtttagcttggtgttaaaatctggattgaaaattaatgtgactgttttgaagacattgttccattagcttccagtgtcactattgagaagtccaatgtcattttaatcctcattccctttttcttcccactctgaaagattttaggatcttcagtttatccctggtgttcctgacatttcatgatgtaccttggaatagatatttttctttacttttgcttgtggggtagattgtattttccaaaaaggctgtatatgtatgtgtgtgcatactccccccatctcacccaatatgctattctttgtgcctccatcaagcagtggggtctttgtttcctcctcttgaacctgtgcagacaggaattctcccccgaacgttttggatcttgagcattgtgttttaagagcacagctgcaagatcaagaacatgcacctggcactgctaggtgcccagcgccatcaggccagcatctcccttcccattttccttgtgaccactgtttaggcattgagattaagcactgtagatgtgtatgtgttcattgagagaggggattaagtttttttacttttaaatgaaatcaacaatgaaaatatcaattgacatcagagagagtttcttttaagcagtgaaatgaaccaacatgacggctgtcaggtgcattttttaaaaatccaccttaggaaatgacaaaaaaagaaatgaccaaaaagaaactaacttgagcttcatgattaaatatgtcattattaaatgtgacaaatatattgtttgcaagaatttctgtgatgagaagatggaagcaaaaggagctgcataaatcacagcttcacagaacattgtcagtatttttgtgtttatctcatggatacatattattattattattttgagatggagtctcactctgtcacctaggctggagtacagtggtgcaatctcggctcaccacaacctctgcttcccgggttcaagcaattctcctgcctcagcctcccgagtagctgggactacaggcgtgcgccaccatgtccagctaatttttgtatttctggtggagacggggtttcactatgttggtcaggctggtctcgaaatcctgacctcgtgatctgcctacctcagcctcccaaagtgctgggattgcaggcatgagccaccgcatctggccttgtttgtttgtttgtttgtttgtttgtttgtttgtttgtttgtgacagggtctcactctttcacccaggctggagtgcagtggcgtgatctcggctcacttcgacctctgcctcccaggttcaagcgattctcctgcctcagcctccccagttgctgggattacaggtgcccgccaccatgcctggctaatttggatacatatttttaaaacatcctttgtttactctttaaaaattttaaaattaaaaacccttttttttctatttatagctgctttatcattcatttggcttttccatgacaccacccaagtggctggatattacaagagaacttcagattcatgaccaaaaatccgaagtagacactcagcactgcccggcaaagctaccattgaatcttaataagatctttttgcctatcactatttcataacttctctccactccttaaacttatcagcaacccacccctcctactcagataagctgacctcatagttcattgagggtttaggagatatcagacagaaaccactcatcttccccccaaccaaatgtagaaatctgccttccttagacccatgttttctgtctcctgtcggaggcaagctcccctttctactgtgttcctcctcacatcttctatacctcatgccccctcatatctcacagctttagcatttttgccctctctcttgcatcatcagcaactctccagggggctatccatgtcagcatacacatatgccgtgacgttgcccatctttaaaatcagaataagcttcagcaaacaacttttccctgaccctcctctatccctttctatttacctacatggttaagtctctcaaaagagaagtttacgtgccttccctacctcctctatagtacgtaccaccctctgaaattctgttgtttaataatttttgtgtgacttacccctaatagaaggtcagctccaggaaggcaaggacctcatctgtcctgtttaccactctgtcccctaggacagcaggtggcacaagtgtctactcagtacatgggcaaaagaggcacaactgacctggtaaaatagcttttgatttttaaaaatttctaacaagagaatccatgttttttaattactcaccattttttgctacacttaagaattgaaacaattatgaagaatatattaatgatcaaattttgccctatgttacatttcattctttcataagtatgacttaatattggcagtcttgggccgggcatggtggcttatgcctgtaatcccagcactttgggaggtcaaggcgggtggatcatgaggtcaggagttcaagaccagcctggccaagatggtgaaaccccatcttactaaaaatacaacaaattagccgggtgtggtggcgggtgcctgtaatcccagttactcgggaggctgagacagagaattgcttgaacctgggaggtggaggttgcagtgagccaagattgtgccattgcactccagcctgggtgacagagcgagactctgtctcaaaaaaaaatatatatatatataatatatataaataatatatatataatatataatatgtataatatatatattatattatattatatattatacatattatatattatatattatatatattatacatattatatattatatataatatatatattatacatattacatatataatatatatattatatatataatatatatattatacatattacatgtataatatatatattatatatataatatatatatatatttgcagtcttgcacctggactctggcatcagactgcttggagttgaattccagctctttcactttttgctatgtgacctccagcaggtttcctaacctctctctttcttcatttgtaatgtggttaataatagttcctacctcatgtgtttgttttgtgttccaaatgagataatatgtaaaacacgaaactcagtactcgtcttgggagtaaactcaatgaaaaataatagtaattattatagcctcctccagtttataatatttgactctgacttggtctctataatatttttgttcaaaatactatatctcctagggtatatgggctatcaatatgatgattcagctgttcttggttttgtggggggcgggggtgtgtttgtttttaagagagagagtcttgttctgtcgcccaggctgcagtgcagtggtgtgatctccaactcactgcagccttaacctccagggctcaaacaatcctcccacctcaacctcccaagtagctgcgaccacaggcacacaccagcatgccaggctaattttttttctttttttttttttttttttgtagagacagggtctcactatgttgcccaggctggtctcaaactcctgggctcaagtgaccctaccagcacctcccaaagtgctaggattacaggcaggagccaccatgcccagccaataaatcattttgatcacttgataaaatatttttatttcaagccaagtcctgttctttgtttatttggttttctcagaggtgaggttctttcttcatgttattccacattaagttttcttatttctggaaatggagctttaaaaacacccaatatatcatcaacagatttttttttcttttgaaacagctataagacaatgttcttttcatctactagctagctgggagggtaaatatatgtagcagtacgaagtatattctgaggaccacataaaaaatacagacaggctctgtagaagttcaggctagggagagtcaggtacttctaaccctaagggattcctacagcttttctgcatgttaaatagtctgttttagcttattctcttattacttgtcttggtttttactttgaaagtttgcttaataatcatgggaatattttagattttaaaatacaaaatatacaagctaaacttgagagcagtttttagttgtagaaactgtttcttgaagtaattgacttagcgtttgctctgcctctttcttttcttacctaggtaggtagtggggactccttcaattatctgagcaattcaaatctcagaatgtagtgttgggtaaattgagggttctaaaagaatgccagatggtttgaaaggaactgtgagcattccaactagtgcagtcctttgaaagccagctggcagagcctcctgtgctttggaggtaggaaccagacactttgttccatgccagctggcccaagaatagctggccagtggccttgcttttggctggccactcttgggaaagctggcctgggccctccatgtgccctaaggatagtctgataccagagagttgcactggccctccatagtaccccagggagttggagaaagcctgcagtggcaagggaaaggaaactgctatttagataatgttacaagtgaacctcgtgttacaaatttgctctggaaatttaatgtaatttgaatttttatggattcactactgttaggtgtattaaagttgcaatgaactgtagtgaatgtttttatattgtaagtaacttccaggttacctgcttttaaagttcctgtttttatttgtcaacttttcttaaagtgaggtttgcccgttccttttgttgtcatcttctaaagttttgatcatttgaattaggaaaatttttccatcttgttgtaaagcttgctcctgtgtaaaccatagacttttttttttttttgagacagagacttgctctgtcacccaggctggagtgcagtggtgctctttctgctcaccgcaacctctgcctcctgggttcaagcgattcttctgcctcagcctcccaagtagctaggattacaggcatgcgccaccacactcagctaatttttgtatttttagtagagacagggtttcaccatgttggccaggctggtcttgacctcaggtgttctacccgcctcagcctcctagagtgcggggattacaaatgtgagccaccacacctagccataaaccatagattctatagaaggttaattatgtatgtagtcttagcttgtctctcattttgatggtacttatgttttcccgattagacaggtgcttgtatcagatacagttcttcacttcctttagcagatttaatatcataattgtttaattgacagcaaaataagtgcaaatatcatactgtaagaataatgagcattcagttcatttgatgacagtgtttattgaattctcaaaattaatagtttcactgctgtctatcagtatgctttatgttgccttaatttttttttcaaatgtgcagattgaatggtgctgcagtatctgttaagtttattaagttcatcttggcaaaccaaaaaaaaattatagctacctgtatctctttattgttccttcccaaatctgagcatgtgaaattatgctcagtgatataaatttgaaatagaacctaaatattatatctaaatagtctctttatcttggactgaatgaaaaaagttgacagataatgaaacgtcaaattatgagttaatgtagtttgtgggaaatgggtgggaagggaaatcaaaggtgtaggctttcattcattttcttcagcatgaaacaagttgcaaaacttcttcagaaatgtgttggaaatctcatgcatggctataattaaataaaggcttttactcaaacttgtcgattatctctgtaaacagggcagatggaattttcggcgtagtaagattttttttttcttaaatcacagaacagtatatcaatagccaggggcaatattatactcagaaaatcatctttcatattggttaacctacactaaaaagcttttatgccagtagctttaaatatattgcctatttactgcttacagcaatcctcaaagagttgtttatggatgacaaactaaatgtcaaagaagtaacctgttcaggtttacaagttcagggtccagttttgaacctaggccttcatcctctagagcccaccacctgtcacagtggatgttatcaacttttcacaagaatacagtctctttactattcagatgttatcctgtactggcacctctggagggctattgataatggaagtgcagagatctttgcagataatagcaggagaataagaagagatttggggtagggggcagaatctatattttttaaatctcttctgatgctcctgcagagctactgcagtaaataaaaatgacttgtcagaatcagatggagcaaagggggtttattagtttcttaacattgctgtaacacaattactataaacttcgtggctttaaacaacagaaagttgttctttcacagttctggaggtagaagtccaaaatcaaggtgtcagcagggttgctgtgctccctccaaagactctagaggggaatccttccttgcctcctccaggttttggtgattccacacattctagtctctgcttctgtcttcatatggtcttctctttctctcttataaagacacttgccattggatctagaatccattcagataatccaaaatgctctcatctccagatccttaaattatatctgcaaagacccttttttttttcttaaataaagtcggttcaaataaagtcacattcaccgattccttgtgttaagaaatggacatatctttttgagggccaccattcaatccactcaagagagtaagatttttccttggtaataatttttactttgactactgtctcacacagaatccgagattagacaagtattcagcagaccatgatacaaagtgtggaaaaatattggaagatagaaagacagaagattgaagttcaggggaaggtttatggggtcaaggcaggtttcatggaagttgtattgcttgaggtacattatgaaggatggacagaattttatgagatagttggggatagcctgggatgtgcagatagtggaagtatcaagaaaaaagatagggagtcatcttcaggaacgataactaatgcatttgactaaagtctggtatttagagaaatagtggagaatgaggatgaaaagtccgggccaattcatgggaggcctttagtgttgagctgatgaatttgtacttggtttagagttgcttatccataagaatgctatattataagagtttctggccaggcgtggtggctcacgcctgtaatcccaacactttggaaggccgaggtggggtagatcacttgaggtcaggagtttgagaccagcctgtccaacatggcgaaaccctgactctactaaaaattacaaaaattagccaggtgtggtggcacatgcctgtaatcccagctacttgggaggctgagtcaggagaatctcttgaactcaggaggcagaggttgcagtgagccgagatcacgccattgcactccatcctgggcaatagagtgagactctgtctcaaaaaaaaaaaaaaaaaaaaaaaaaaaggagtttctaacatgggccttcaaaacaatgataaaaccctttgaaagaaatatgtagattttctttcaaaatagattttcagagggttccataaccctaagaaaaagttaagaactactgctctattagaaatgaaatgttttatgctttgaagatgtttctggaaaactattgattttctgttctgtttactttgaattgcttggaagataatttgaaaattgacctccaaagaaacttagtcagcgctgtgtgtggaatatattgtaaatgttgcatattaaaagttaaaatactatttcagaagggatgtgaaggaggccctggattcttagaaaatgattacacaaaaagaaaaattctgggccgggcgtggtggttcacgcctgtaatcccagcactttggtaggccgaggtgggtagatcacgagatcaggagttcaagaccagcctgtcccagatggtgaaaccctgtctctacaaaaatacaaaaaaattagccgggcgccgtggcaggcgcctataatcccagctactcagaaggctgaggcaggagaatcacttgaacccgggcggcagaggttgcagtgttctgagatcgcgccactgcaccccagcttgggtgacagagtgagactgtctcagaaaagaaaaaagaaaagaaaaagaaaaattcaaagcattcagttcagaatgcagctgtgacttctgttttctgtgtcttcattttctctatttcaattcactaccaccatccatttagaacaccagaattatataaaagcgtgacacagttctaaggggagtaaatggacagctgcattcctaaagttttttttaaaaatgtattatataaaaactgtattttatctactgttgatttccagtgaaataacctacttcaggaaactatattatatagctgtctggtcatatctgaggaaaaaatgatattttccatataatttattctgtttctaaataatcaactgccatgacttttttcattgatccttttgttttctacctgagattaatattacttaatagacttacctacactattttttcagacttttctgctagtgaggttcttcttttaaatttttttattatggccctgtgcctatcagtgggattcaacaattaacaaggttttgccacatttgtttcatttatcctttatcttttacctttctttgctgaggttttgttttgttttgtttttttgttttttgtttgtttttgagacggagtcttgctctgttgcccaggctggagtgcagtggcaccatcttggctcactgcaagctccgcctcctgggttcacgccattctcctgcctcagcctccagagtagctgggactacaggcgcccaccaccacgccgggctaatttttttatatttttagtagagacggggtttcactgtgttagccaagatggtctcgatctcctgacctcgtgatccacccacctcggcctcccaaagtgctgggattacaggcatgagccaccacgcccggctaatttttgtatttttggtagagatggggtttcatgatgtggcccaggctagtctcgatctcctgacctcctgatctgcctgcctcggcctcccaaagtggtgggattatgggtgtcagccaccgcgcccggccctgtttttttttgtttgtttttttaagaggcagggtctcactgtcgcccaggctagagtgcagtggtgcaatcttagcttaccacagcctcaacttccaggctcaagcaatctctccacctcagccttctgagtagctgggactacaggcacatgtcaccatgcccagctgtttatttattaattttttttaagttttatagagatgaggtcttactctcttgcctaggctggtcttgaactcctaggttcaagcgatccttccaccttggcctgccaaagtgctgggctacgggcgtgattcaccatgctggcctgaaactttgttctttggtgaccacaaatcttacacattctgctttctttcctctaccagaaataagggtgatttttgtcttttaagtaatatttcaattatttcatccaatatgtgttttggatttacaatcttacctttattcatatcaataactattttatgtgcctcatattcagcctgaatttacagaaagctacatttgtggtaagaagcacttgatgaataaccccactacattttattgttttagttcacttctgagtttattagatctgatatcattttaatattttttcaggcattttacatatgatctgacttaaaagttcctgtaatttgaaaaaaactggctcttcatgaggttttttgtttgtttgtttgtttttgagatggagtctcactctgtcacctgggctggagtgcagtggcatgatctcagctcgctgcaacctctgcctcccgggttcaagcaattatcctgcctcagactcccaagtagctgggactacaggtgcacgccaccacgcccggctaattttttgtattttagtagagacagggtttcactgtgttgcccaggctggtctcgaactcctgagctcaggtaacctgcctgcctcggcctcccaaagtgctaggattacaggcatgagccactgcgcctggccacatatatttttgcatagtaagttccaagtaaatttccataaaggtaaaaaagaagcagggtgatatacagaaaagcgtgtgggattcaagtaagttttgaccctattatttgttacctatttggccttggtgaatcactatttagcctcaaaatggggataattatcattgaatattccagttattgtgagtgtagtttatctccttagctctcctaatgattattgttattaagcaaggaataacaacaaacaatttttgctacatctcagttcccctctttttataaatatgagttcagttatgcagccagcttagcctggctgctgaactgtggctggtcagaagttccatttcggtggatgtcagatgatgtaaaaattgtaactgcctaactgtactacatagttcttaacttttaaggagattatatatgcattaatataatttttttttttgagacagagtttcactcttgttgcccaggctggagtgcaatggcttcatctcagctcactgcagcctccacctcccaggttcaagcaattttcctgcctcagcctcccaagtagctgggattacaggcatgcgccaccacacctggctaattttttgtatctttagtagagacagggtttcaccatgttggccaggctggtttcaaactcctgacctcaggtgacccacccacctcggcctcccaaagtgctgggatcacaggcttgagccaccacatctggccattaaaataccgtttttgatgattgttttaggcaattctcttttgcctttttttaacagctttattgagacataatttatatcccatatagtttgctcaaagtgtacaattcagtggcttttagaatattagagttttctgtctatcaccacaatcaattttagaacattttagttatcattattccaaaaagaatggccttcgctcctcagtcccctcattctccccgctcctcccccttcccttgctctaagcaactaccaatctactttctatttctatagatttgcttattctgggcctcttatataaataggattttaaaaatgtatcctttatgactggcttttttcacttaatatgatgttttcaaggttcatccatgttcttttttatcttaaggctcttagagatatactgacttatcctgaaggaagaaaagatgaagtgactttttttgtttgtttgtttgttttgttttgttttgagacagagtttcgcctctcgttgcccatgcaggagtacaatggcatgatctcggctcactgcaacctccgcctcctgggttcaagtgattctcctgcctcagcctcctgagtagctgggattacaggcatgcgccaccacgcccagctaattttgtatttttggtagagatggggtttctccatgttggccatgctggtctcaaactcctgacctcagctgatccgcccgcctcggcctcccaatgtgctggaattacaggcgtgagccactgcacccggccgtgactttttttaaacaaagaaaattgactagtgtttcatgagtcttcagtcacaaatgacgagaaaagccctataaacggttactgtagctatagacctaagaatggtgttctagtgtagaatgtggaaaagattcatgtcccatcattccttttagctgcatttgtatatatgaataatgtcatggttgttagtgaatctttcagtacaaaggataataatgtgcaactctataggactgttgtaactaaaactgttgcaacactctcacttttatttgctgttctcttgtaactaattttccagctgactatcctgcataactcagacattcttatatgatatctatggttacatgctacatttttgttttttgttttgttttgttttttgagacagagtcttgctctgtcacccaggcctgagtgcagtggcctgatcttggctcactgcaacccccaccttgcgggttcaaacggttcttctgcctcagcctcctgagtagctggggttacaggtgcacaccaccacgcccggctaatttttgtatttttagtagagatggggttttgccatgatgaccatgctggtcttgacctcctgacctcagatgatccacccgccttgacccccaaagtcctgggattacaggtgtgagccaccacacccagtcacgtgttacattatttattttttttaatttaattttattttttgagacggaatctcgctctgtcacccaggctagagtacaatggcgtgatcttggctcactgcaaccaccgcctcctgggttcaagcaattctcctgccttagactcctgagtagctgggattacaggcacacgccaccacgcccggctaattttttttttttttttttttttttttttttttgagatagagtctcgctctgttgcccaggctggcgtgcagtgttgcaatctcggctcactgcaacctccacctctcgggttcaagtgattctccagcctcagcctcccaagtagctgggactacgggcatgtcccaccatgcctggctaatttttgtatttttagtagagacggggtttcaccatactggtcaggctggtctcaaactcgtgacctcaggtgatccacccaccttggcctcccaaagtgctgggattacaggcgtgagccacaacgcccagcctaatttttgtatttttagtagagacggggtttcaccttgttggtcaggttgctctcgaactcctgaccttgtgatccgcccgccttggcctcccaaagtgctgggattacaagcctgagccaccacgcctggccacattttttattcttatgtgagcttgatgggctgaatgctaagtattttatttcaggataaccaattattgcatattagtataaatgagctgttggggacaggatacttagaagtgcaacccttagagcatattccccctcaaatttttggatgtagtttgaaaaataaaagccagccttttagctttgaaaacccagcgtctgtgtgcctcaatctcttcctctgaaaagtggggcatttggactgcgatacttaattagtgctgaatgtagttctgtgaaaataattggcaaatgtattgccgatggtccccattatttcttacatcatatcaaaaagattacattgtaatgttagatttcctgtattctaattagttgcctaatgtagtgtcataagtatctatagtcttagcaaaagccatatttttctgtccaggtgcagtggcttacatccgtagccccaacactttgggatgccaaagcaggaagatcacttgagcccaggggtttgagagcagcctgggaaacatagggaaaccccatctgtggaaaaaaaaaataattagctgggcgtggtagcacatgtctgtggttcgagctactctggaggctgaagagggaggattgtctgggcatgggagtttgaggcgacagtgagccatgatcacaccattgcactccaacctgggcaacagaacaagaccctgcctcaaaaaaaaaaaaaatcctgtatttttctgacctagaattagaatccatgatctgttattctaaatggtctgtgaatacaaaataatttaaaatagtactgacctacctagaacatcagtatattggaaggtttcagctgtgagtgacagaaaacctgaaacaagtggcttaaaataagattaaaatgtatttcttttttttttttttttttttttgagatggagtcttgctctgtcggttgcccaggctggagtgcagtggcgcgatctcggctcactgcaacctctgccacctgggttcaagcaactctcctgcctcagcctcccgagtagctgggactacaggcacccaccaccacgcctggctaatttttgtatttttttttttagtagagaatggggtttcaccgtgttagccaggatggtctcgatcccctgacctcgtgatccgcctgcctcggcctctcaaagtgctgggattacaggcgtgagccaccacgcccagcctaaaatgtatttcttattcatgtaaaagttggtacagatctggaatggagcttcatggcatcagggacattttaccacttactcctagttctctcttaccactctgccctcctcttgggtgtaaacctcatttttattgaggaaaatggtagcacctattgcaggtacaggatggagaaagggatgaagcagaagatagaaggcacctgtcagtattctgttaagcatgattcccagacaacttcatgtgcatcagttacattggccagaactgagacatatggccgtgcacagctgcaaggaaggctaggaagtgtagtcacatgcccaaccaaaaattctaattaagtggaagaaagggagaacagatattgagggtggggtaggacagaaaaccatcagtctctgatacagactcattaatgataaacaaaaggaaaaccaaagagcagctaccattctctagcttcctctagagaaggaggcttctgtttctcgtagccgatactgattctctaaatggaaatgtccattcggagaatatactaatatacaagatccgatctctacaaaatatatatattttaaaaagaatatgtcattctcttttctgtaattgtgttagtgcagagaatcttccaaaagaaacctgctaaatatattttctggtttgaattttggagttgatattatggtttatgagccaacctcttgtgagtttggttaagtgtaaatttttccagtgagtctgtgagcccctggggaaaatgatgaagtagagaatagacccaactcttgacgtactgtgaccttactgggagcatatatcttgtacagcttcatatgacctgaggcactcatcattcattcctgatcttgaaggaagagaaaaattacaaacttgtatagtcttcaatatatccatctataaaaccagaataatagcgctttgtgtgatgaagattagtagtagtcttgtaaaacatttttataaaggaaagagagctttcagggctaatgaaattgcaagtcttgattctttaagactcatttagaggattattcactgttctgaaatgattgtgatttttcagcatttttgaaaaaaaaaagcagaaccaaattcaccccccaaatattgaaataacatttgatctgccccatcgtctcagttgttccattggctgcctaaaatcattttaaagatgaagtcttcacatatctttcttaaaagaacgaggtgatcctagtaaacaaaggggagacttccaggcagtgcttaggactgtaatttttagaaatgcaaggtaattatcaccagtgtcaaactaccaggcagcctgcacactttgctgattcataaccatttgaagaatgctgaattagtcatgaacatcttagatgctgttttgtggctgtagaattttccttctacaaaatttagatctaaaaacagatagggttttaatttatacaggttggctatctggaaattgttgttgaagaaatgtggctaaactaatgtctgtttctcagtattctgtaccctgcccctgtcacttcagaaaggagtccacttgtggttcaggctcaaagatgtagatctaacccagagtggcccagggagatgtggctcaggcccaaatgattcctaaccccaatgccagcctcacaccagagaacaaaaagagacctgatgggaatgatgagcactcactatatgccaggcacaccccagaggtggatgtgggtaactctccctatattatagatgggacattgagacttgcctacaagtccccgtggtggggcgtggctaaactcaactctgtaaggttactgcctctgctatgccatctttcatggaacccacttagtgccatgcagctttctctaatttgctctcagttcctggctatgaattgctaaactatcagtgacattgttttctctcacttttaaggctgtacaatgaaagaatcttccatttttcatttgttagcttgttgctgttttaccactctagaagtgcttgtggtttactaaacttctttatttcacttttagtacgtgcagtttatgcattctagtcttttgtcttcagggattctaaactcctgtaggaattctaatacctttttgggtaactaagaattcaccattaaagtcctggaattaatgtgttcaatctagaatcctcaagaataagaagtgagctgtcgaggtttatagagaaccctgttgacacttctcccagagtagcttcaacagggtccaaagactcgtcacctttcccaggggtttggttttgaattaggatcactgacagttcagcaactttatgctaccaattagaaaaggagatcactatgtagagaaaatttagtgccttctaatcacctttgtatacttgaatttagttattaatttaccctgtctgtagaatgaacaaactcaactcctttaatttaaaacaaatgaaataactctttaatgactgctccattaaacagagttgtattgatttctatctgttatactccagaggtaggtgttttaaccctgtgcttttccggggagttataactgactgttgatggacaggtgtcacaaatacaactgatacattcagattgtcacagccaattcctacctttatttaaagagtgattttcttttttctatctttagggccactctggctctttatttcaggatgttttcttgattatctcatagacctagcaattcccaaaggaggtttgtaatattcaatactgtttcgagaagtgccatgacattttcagaataaaatgaacattgattaattttaatttaaaagacacagttctttgtcacagattggaggagactaaagagatacaattaatgcaatgtgggatcctagaacagaaaaagaatattagtgggaaagctggtgaaaattgcataaagtctgtattttagttaataggattatatctgttgatttcctgtctttctgctatccttaggtaagattttaacatttggggaagttaggcgaagggtatttgggaactcttgcaacttttctataaatcgaaaattatttcaaaataaaaagtttaaaaatatataccttgttgccagttatttagaaattatggtgtgggcctttctggaggccctctaaggcagtgaagatgatccaagatgcatcagcatactaactgcccacaggaaccaaccacggaaattgtttttacttgtgtatccattctaaccctaccagtgcagtccaggcttatcaaggtccatggaaggcagcaggttctcatgggaagagtaagaggtttgatttcagatatgtggccaggagtggtggctcacgcctgtaatcccagcactttgggaggctgaagtgggcagatcacttgaggtcaggagtttgagaccagcctggccaacatggtgaaaccctgtctctactaaaaatacaaaacttagctgggtgtggtgacgggctcctgtaatccagctactcgggaggctgaggcaggaaaatcacttgaatgtgggaggtggaggttgcagtgagctgagatcgggccactgtactccagcctgggtagtagagtgagactctgcctcaaaaaaaaaaagatgtgagttttcagtttcttctaccactcactagtggtttcagtttgggcagctagcctgacttttctgagtctcagtttttcatctgaatactggggagcataatatctatcccatagtgattataaggattaaataatatgtatacaacctagtcacaaactctaaagcacaatgtaaaatgttcattttgattaatatccaaattaatcacttggaaaaaaaaggttctccagtttcagggattatacatcaggctaactctttttaggtaatttttcctagattaattgtattgctacattggatgtaatcaaaatccatagatgatatatttaaaattgtgcttataacatttttattattaacaatccatttgaacctaaaccaatatgacaaagaaacaaagtagtaagctgaacactgtagtctatttaatacaaagatttacttgcatattattttgacttatttaagccaatgtctagcctttttgctttggaaattatgacactaggaagagaatttcaaatatgaaaatcccaaatctgtcagtttccatgaaatttaaagccaaagtcattaatggaatccatggagctattttcaagggagaccctagagagatacaatgtccagtctaccaattgtacgagacttacaaccttgtagtttgtttgcagaagtaaattattctataactaattgaaaacaaggagcttattcaaaatactgaagtgtacaaatgaacaacagcaaaaaaaaaaaagacaaaatactgaagtgctaccaggtacctgtgatgaaattttatatttcttgttttacatccaagtttgtaatctgtgttacaaacttacatctaaagtttattctaagtccgtatttcatgtggcttcatgctctgattctgcctggtaaagtgctgcagtgtggtttcaaccagattgtaattattattcttcctgtatgttgatataactgctttactaaagtagcctcacatagctcaatcagagttttctccaaaaatgtcagtctaatgccaaaaccaaaagagatcaaagacatggaagatttcctagtgaagtcagagctgctcatcagtagtgcttacctttgaataaagagaaatactttaaaaagccaactgttattgagtgggtaaagtaatgagtaagatctctgttatcctcaaggagtattgtattgctacactggatgtaatcaatgtagtattagaggattacaatcaatgtaattctgcgctcaaggagtacattttccaactcagtaaaaagtagtgtattagcaagtatagatggaaattccgtgtgtgtgtgtgtgtgtgtgcgtgtgtgtgtgtatatagccacacatattctattcatgaaacggcaatctcattagattaagacaataatgtgcattattcatgttattttactgtcattcgagagatattagacaactgagaagaaacaatttatatataattataaatgtataattaaaatgatcattaaatgattaccttatctaagcaaatgctgatttaagacagatagctataggatatttgtgaagtatctaattatccttgtgataatttttcctcactacatttatccagaaaaagccaggattttcaactaagtcttttaaataagaatcaaggtttttaaatttctgtgaatctttacaaacaactgggacaattttctttaaaaatagcttcttaaggcatggagcagtggctcacgcctgtaatccctgtactttgggagacttaggcaggcggatcatgaggttaggagatcgagaccatcctggctaacacggtgaaatcctatctctactaaaaatacaaaaaattagctgggcatggtggcacatgcctgtagtcccaagctgcttgggaagctgaggcaggagaatcacttgaaccaggtaggcggaggttgcagtaagccaagatggcaccactgcattccagcctgggcggcagagcgagactccatctcaaaaaaaaaaaaaaaaaaaaaagttgtttaaaaaataaataaaaataaaaatagcttcttccaattccatttacaattaaattttttattctctttaataggtaacattaacatatcctagcagcaaaatactaaagatattataaacaggtattcagtgaagtcattctccttccagccctgtcagaggctcaatcactgataccagttttttatatatttttctagagacctttttagacaaatacaaagctagcttctcttttctttttatatcagaggtgatatgccacatgcactgtcctgtgtgttgtttttttgttttgttttgttttttacttagcaatgttatcatggaactgtgccaaatctacatttttttttttaatttttagagacaggatcttgctctgtcatcttggctgggatgcagtgatgtgatcatagcttgctgtagtctcgaaccttgggtcacagatgatcctctaacctcagcctcctgagtagctaggactaaaagcatgtgccaccatgcccagctaattaaaaaatatatatatgtgtgtgtgtatatatatattatttttttaactgtgttggcccaggctggtctctaactcctggccttaagcagtcctcccaccttggcctcccaaagtgctgggattacaggtgtgagccaccatgactgacctggtatcattctttaacaactgtaaaacattagattgtgatgatattctatgacttaaccaattacatatttaggttgcttccaaccttttgcttttataaacaagtttgtgtgaagagcctggtacaaatgtgtctttgagtatgcatgcaagtacatctgaaagataaattcctaaatgtggaattgctgggtcaataggtaagtgcatgtataattttgctgagttgctcttgtggaagccaataattctactcacaattccactgataatgtgtgagagtacttttttcccccaagcagaaagtttctgtggattttttttgggggtgtttctgagttttacttagaaaggccttccccattttgagattatttttaaaattctttgatatattttaatattttcataatttcattttttatatttaaaccttaggtacagctcagatatattttaatacaaagaataaggctatcttaattttttttctcaactggctacctaattgtcccaatatcatttgtgaataatccatctctctctctttctctctaatgggaaatgtcagctttatgattcctatattaatttgggctattctttaactttcttgtatctgccagcgtaggctaggttatgttgtggtaacaaacaacctcaaaatcttaatggcttataacaagaattttccttccttttggtacatgttcatcaagagttggctgagagctctactccgtgtcttctcactcagaaactaatggagttgccaccatcttgaacattaccagctttcctgactaagggaaagaggggcctggagactctcacaccatcagtaaaatgttcagcctgaaagagatatacatcagttcccttcacagctcgctgacaagttttagtcacatgactctacccacaacaaaacagcaggaaaatacagtcatacatgtgtgcagaaggaagatggaaagctgaaaatatttggtaaacaacaactgtcgtatttctattctgtcctgttcatctgtcaattcaagtgtcagcagcacaggtttttctttttttattttttttttttgagatggagtcttgctctgtcacccaggctggagtgcagtggtgcaatcttggctcactgcaagctccgcctccagggttcacgccattctcctgcctcagcctcccgagtacctgggactacaggcgcccgccaccacgcctggctaattttttgtatttttagtagagacagggtttcaccatgttagccaggatggtcttgatctcctgacctcgtgatccgcctgcctcggcctcctaaagtgctgggattacaggcgtgagccaccgtgcccggccaggtttttcttttttagagtatttctggctgtgctttcattttcatttttacttttaaactagaattagcctttttaccactcttgtcctctcagaaaagacaaaccctgtcagtttttttgaattgtatctgcattaaattgatagatttaaggaaaattgacatctttataatatttagcgtctttacaaccaagaagagggtattttagtcattcacatcttcttttgtgtcttttatattttcttaatacagattgcatgtatttattagtaagtattctttttgttcttttaataagattcttttttattttaccgtcacctgcaaataatcattttaatttcttctttacaatcaggttggttttcttgaaggattaaaaaagatacagccattttcaaataacataatctattatccaaaatatttttcaaaaaatttcatatgggcctggtgctgtggctcacgcttgtaatcccagcactttctgaggtcaaagcaggagaatcccttgagctcaagaattccagaccagcctgggcaaaatagcaagaccccatctctataaaaataaaaaaattagctggacttcatggtccatgcctatagttgcagctcctggggaggctaaggcagaaggattgcttgagcccaggaggttgaggctgcagtgatctgtgattgcacctctgcattccaacctgggctacagagcaagaccatgtctcaaaaaaaaaaaaaaaaaaaagagtttcttttcatgagccatctctatattaattccagtgaataagtaggttaacattaatgataagtgctgtttattccagttactggacacaccaattttttttattttttattttatttatttatttttttgagacaagatcattctctgtcacccaggctggagtgcagtggcatgatcacggctcactgcagcattgacttcctgggctcaagcaaccttctcacctcagcctcctgagtatctgggatcacaggtgcatatcatcacacctggctaatttttaaatttttttgtagagacggagtcttgccatgttgtccagtctggtcttgaactcgtgggcctaagctgtcctctcaccttggcctctcaaaatgctgggattataggcatgagcgaccacgcccagcctgaaataccaaaaaaaattttttttttttattttaagctgctgctgctgctgaaggtgaagatgcttacatatgtgattagttacctatacatctggaaaatttttgtttaatttccctaatttacatgatctctacctatgcttgcttgtgtttttctcatatatctagccagcctcttaagagtgaatactctctagtttactgtaaattactgcctgcagtgaaaactctttaaattatgttcccactcatccccttccaagagtccagtacaatcacagaagaggctgagctctttaaatattatgagaatctcagaacctctgttcatgtggctcatcgaatcctctattatgggattcttttcatggaaacaccaaatttttaagaatcatatttgttttgtgctctgcagatatctgttatgctgacctaatagaaccaggagctaatgagtctttaatgtagactaaaaattggctctgagtaaagaggctcacaggcccattcatcaaacttgagagagatttaaaattaaacatctgcagataattagaggatagttttgagtgccaaaatgaggtattgctgtcctgttgcgttttgattttcctcacagcagaaaaaaacatgttttcttgggaactaaatcagcttttttctaaaattaagtagttatggtattacccctagagtttatttcatgttgagatgggaaccgctcattgcttcgtatttcttttcacactgcctttgtgtaattatgatgtaaatttcaacctgagagtattttcttcctttataacttgtcttctatttcatcctccttctgtctctgcatcactctgtgttgtttccccctaacccatattcctaagagtgctgccatcaattaatcaaaaaacaatgaatcatgtagaagtcaatagttaaatgttgattagcagattctttgtaaaagtatagggctgggagttgtggcttacgcctgtaatcccaatgctttaggaagccagggtaagaggatcccttgaccctaggagtttgaggctgcagtgagctatgatcatgctactgcaatccagcttgggtgatgcagcaagactctgcctcttttaaaaaaaagaaaaaaaaggccaaggtgggcggatcacgagatcaggagatcaagaccatcctggctaacatggcgaaaccccatctctactaaaaatgcaaaaaaattagctgggcatggtggcacgtgcctgtagtcccagctacttgggaggctaaggcaggaaaatttgcttgaacccgagaggccaaggctgcagtgagcctagattgtgccactgcactctagcctgggtgacaaagtgagactctgtctcaaaaaaaaaaaaaaaattatactgcatgcacactcatgcctgggatatagatgtcaggagggaatttgagttctactgaatctaaggcacaaaaacagaagaagaaaggcgctgggcatggtggctcatgcctctgatcccaacactttgggaggccaaggcaggggggatcacttgaggccaggagttcaagaccaacctgggcaacatggttaaaccccatctctacaaaaaataaattcaaaaaatagctgagtatggtgacatgtgcctgtagtcccagccactcgggaagctgaggcaggaggatcccttgagctcaggaggtcgaggctgcagtgaggtatgattgcactactgcacccaatccaagcgacagagtgaggagggagggaggaagggaggaaggaggcaaggaggaaaaggaaggaaggaggaaagggaaggaagaaagaaaagaattaaatccatacctgtgaaaagaacagttaaaaaacaaagggaacatgagacgtcaaattcttctttgccctcaaagtgaagtctcataaagatctaatagaatgatttacattgaaaatagatttcatcattacataaaaatagagaaaatggccaggcatggtggctcacgcttgtaatcccagcactttgggaagccaaggcctgaggtcaggagttcaagaccagcctcaaactgtcttcaaggagaaaccagacctctactaggagaaaccccatctctattaaaaatacaaaattagccgggcgtggtggcacatgtcaataatctcagctactcgggaggcggaggtaggagaattcgcttgaacccaggaggcggaggtaggagaattcgcttgaacccaggaggctgaggttggggtgagccaagatcgtgccattgcactccagcctgggcaacaagaccgaaactgcatctcaccaaaaaaaaaaaaaaaaaaattactaggaatatggcagagtaaaaatagactcaccaaaataacaaacatctgaatttttaaaaaatattcaagtagacaaacttcaattacggtaaacaaagatagcacctcaggctggattttagaactgtggaacagcagcaaagagaaaagctgtgcacaaacccagagaaaacaatggtagcagaagaaacagaaaaaatccaaaatgtgaagaaattggaattgtcagtaacagggctggaaaggataaaaaacacaaaggctattaaaaggaactgatcagggaaaaaaaataagtagattaaatgtgaggcatggtgccacacatctataagcccagctactctggaggctgaagcaggaggattgctggtgctcaggagttcaagtccagccaaggcaacatagtgagaccctttctcaaacaaatatatacatctggttagaattagatgaaaaaaagctaaaacattgcgatgaaacatattttaaaattacaacatcctttgatgaaaaaatggaatcgaaataatgaggtagtcagtaaaattaaggctaaatggaaagatcccgattaaaacatagatggaatagacaaattgattatggcaattccaataaacctaggtggttgttgttgtggttgttgttgttcccccgcccaactgccctttaaataatgggaaggagtgtaaatcggaggaagcctcagaaaaggaaacattaaagaagttactgtagaaaaatagacttttgcctacagactgagaggtttcggagttacttatttccagatttggtacttaaagacaaaatacccaaatacctacttgtcagtttcttaaaactggaaagaagtcttctggtgtatactgagatttgaaagaaaaaaaaaaagcttgaaagaaagaagagttatcctctgaagaataaaaaataaggataacctcaaactttaaactcaaacaatagagagaagatactcttagaaaaatgtttacggaacaccagccatttcttgcctagctgtctgccttttgaagataaaagatttttgaaccctgatctctttttccctggtggaaccctgatgtctatttcaaataattaagtttacagattataaaatatcataaaagactgggaatacagagggagacctttgaaatataagttgtagagactagagcaccttaaaggaagtgaggcagtggtatcattcaggagggccagcttaggtgctgaggctcaaaacctctcagtgcaggatatccaccggaggtgctgcattacagtgtctggtcctcaaatatccagaaatgcagccttgccagggatgactaggtcctgggaaaatcttgataaccgaagctcacaagaggccataaaggtactcaatgaagaagtgaattacttctaatttgccaaaagctttcttttcttttcttttttttttttaagagacagggtctagctctgttaccgaaactggagtgcagtggtatgatctggtcatagctcaccgcagactccaattcctgggctcaagcagtcttcccacctcagcctcctgagtagctaggactacaggtgtaccccaccttgcctgggtattgctatattgctcagcctggtttcaaactcccaggctcaagttgtcctcctaccctagcctcccaaagcactgggattactggcatgagccactgtgcccagactttttcacttgtttttttttttttttttttttttttgagaccaagtctcactctgtcacccaggctggagtgcagtggcgcgatctcggctcactgcagcctccacctcctgggttcaagtgattctcctgcctcagcctcccaagtagttgggactacaggtgcacatcaccatgcccagctaatttttgtatttttaatagagatagggtttcaccatgttggctaggctggtctcaaacatctgacctcaggtgatctgcccgcctcggcctcccaaagtgctgggattacaggtgtgagccacgacgcctggctgatatgtatttttataattattttaggtgatatataaataaaaagattacacagaaagtcactgtgtttagttgtcttagtgtatattttgcagctagtttttcttggagtgctcactgctccaagctgggtattctgtgggtgctttattaagatttatttatatggcagttagttgcacctgcactaaaattttttctaggttaggctgcaaaataaatatacaaagaagtagcttttttaaatgctagaaataaccagtttaaaaaatataaaggaaaaaagaccccatttataatacgtataggcaaatatatatatggtaactagggataaactaaagaaaagtccaaaacctgtatgaataagctatacaaatctactgaaagtagtaaaataaaactagaataaatgaaaagacataccacgtgcctggatgtaaagacctcccttagtccatttgtgctgccataatagaatactacagactgagaaatttataatgaacaggaatttgtttctcacagttctagaagccaagaagttcaagatcaagatactggcatctggcaaggtacctgctgcatcataacatggtggagggcatcacattgcagaaggggaaagacagagagaaacaaacacaaaaggggtctgaactcttccttttataaggaacccacttccttggtaatggcattaatccattcatgaagatagatccctcatagcctaatcacctattaaaggtctcactttgtttgtagagacagggtctcactctgtcatgtagggtggatggaatacattggcacaatcacagctcattgcagccttgacttcccgggcctaagcagtccttccacctcaacatcccaagtagctgggaccacaggcatgtgtcgccacacctggctactgatttttttaattttgtagagacagggtctccctatgttgcccaggctagtcagggactcttgggctcaagggatcctcccaccttggcctcccaaagtgctgggattataggtgtgagccactgcagcaggctcccacctcttttttttttttttttttgagacagagtctcaccctgttgcctaggctagagtgcaaaatggcacgatctcggctcactgcaacctccacctcctgggttcaggcgattctcctgcctcaacctcccgagtagctgggattacaggcacgcaccaccaggcccggctaattttttgtatctttagtagagacagggtttcaccatgttggccaggctgctttcgaactcctgacctcatgatctgcccgcctcggcctcccaaagtgctgggattacagacatgagccactgcgcccaaccctctacctcttaatactgttaaaattgttattaggtttcaagaggagtttgggaggggacagatactcaaaccatagcaagacccattctccccaaaataagctataaatttaatgtactttcaattaacttcacaatagcatttatttatttatttattgagagagagagagagagagagagagagagagacgaggtctcaccctgttgcccaggctggagtgcagtggtgcgattagcgctcactgctcctgggctcaggtgatcctcccacctcaccctactaagtcgctgggaccataggcatgcaccaccatacccagctaatttttatatttttcgtagagacggggttttacctgttgtccaggctgatcttgaactcctgagctcaagtgatctgcccatctctgcctccccaagtgctgggattacaggcgtgagttagtgtgcccggcccaatagaatattttaaagactggtttagctgaaaaaaagattatgtaagaatagccttgaaaatattaaagaggaagagtagtgttgaaaatattgccctagcatatatgaattagtggtatgctaattcatatgtaatgtatgtatgtaaaaatattaaaaaattagctgggcatgatggtgcatgcctgtagtcccagctactcgggaggctgaggcaggagtattgattgaacctgggaggtggaggttgcagtcagccgagatggtgccactgcactccagcctggagacagagcgagactctgtctcaaaaaaaaaaaagaaaaaaagtgactccaaaaaaggtagaactttaagacagtggagaaagaattttataaatgctgttggaatagttgactaaattggaaaaaccattttaggtcttttttccatgccataaattcaagatggattaaacatttaaatttaaggcataaaactatgcaaataaaagagaatataagtgggtatttctgtcatctgatgtggggaaaccaaagatagaaatcgtaaagcaggggcacaaactcagtgccaacagaagccaggcaggaaattgaatcagccaaatacacttggtagaaggcaaaatcatgaaaccatcaatttcttttcttttattttttttgatagaggtagaaatatttacgttgagaaaaataacagcccaagcacaagtggcaacctacatctggtccagaattaggaagtgataaggagtggtagaaatggtgacaaatggcgattctgttgacaatagggccaggcacacttacactgtaacccataagcattcagggccgccccctccccctgccccccccaacacacacacacaaattgtgcaacaacatggcagcctgggagcagaggccactcagctccaggctgtttttgccgtgtaagaatggagcccagggttattagatctgacctttttctgtatagagctggaaattgctaattttatgttaaatctcccaaatctaaattatctcaatctttaaaattttgtacaggccaaacaaaatacttgttcaggccagattcagtccagaggccttgagtttatgaactctgctgtaaagttgtggttttagtttcaggattatgcttacacctttaaatgagttgggatgctttccatcatttttttgtatactctgaatcagtttacagtagttcgcccttattttcagtttcgctttctgcagtttcagttactcatggtcaactgtagtctgaaaatattaaatggaaaattcccaaaacaatttgtaagttttcgattattcaccattctgagtagtgtaatgaaatctcaagctgtcgtgctcactgcatctcacccaggacgtgaatcatcccctgcccagtgtctgcatgctgtgtacactacctgcccattagggtcttggttatcagttcaaaaaaacgtaggactcggtgctatccgggttttcaggcatccagtgggggtctgtgaacatatctaccatcgataagcagggactactgtacatagcagactacttatctatgcaagtttagcgagttccactttcattgccattggggtctgaagccttttttgtgaagatatttctatattttcaagttttcttcttgagccagttttggttatattcctataaaatctattctagaatttaaaattaatactcaaattatctcatggatgtttttaaatctctgcataagaatttttttatctgtctcattcttagtgttttggttagttgatttcaattcctttcattgttttgttttaattcatacatttttgtttgacctttattaattccttcttctggcttattttgtttgatttgttctttttctactttccagaattgaattcttgtgtccatttattttcattattcttttttagattgataatacgatcagttacacttatacacctacacagtagcctgtaagaatacttttcccatgttgaaggtaatggatttttctctcagtatgagatttttttcccacaatgtgattaacttctaaatggtctgtgatttgttttagttacttactagacagaagtcattttattttattttattttatttatttttttgaggtggagtttcactcttgtcacctaggttggagtgcaatggcgtaatctctgctcactgcaacctctgcttcctgggttcaagggattctcctgcctcagcctcctgagtagctgagattacaggcacccaccaccacacccggctaatttttgtatttttagtagagacggggtttcaccatgttggccgtgctggtctgaactcctgacctcaggtgatccacccaccttggcctcccaaagtgctgtgctgagattacagctgtgagccaccacacctggcctgaagtcattttaaagattattttttgaatttataagtagtttccttttgtttatctttttattgttgagttaattttacacattgtagtcacgtattgtggcctctaagagttctgttctgtggaatcttcctatagcatgataaatagtttatctaaatgtagatgttccagattcatatgaaaaggtgttttctttgttaagacacaaagttatacacacacacgcacacacagtatagatacgtagatatataatatatatatattatttgttttgggtttttttttttttttgacagagtctcactcttttgcctaggcttgagtgcagtggcgcgatcttggctcactgcaccctccgccttccgagtttaaccgtttctcctgcctcagctgggattacaggcgcacgccaccgcgcctggctaatgtttgtatttttagtagagatggggtttcaccatgttggccagactgatcttgaactcctgacctcaggtgatccacccacctcggcctcccaaagtgctgggattacaggcatgagccaccacacccagccaatatatatattatttgttaatggtattgtttatgtcctcttttttgttatatctcatttggagattaatatttctatcactataaaacatcattgttcatatagctttttagcctttatttctactttttttaaaaataattagcactcctgcttgctttcttatacttgcctgctatatttttgtttattttcttattgcatcccgcatttaaaaatatcttagaatcatttaaagtgttttcttataataaagctgaatattgttcttatataattttagagtcttttttgattaaagcatagctgtacatattttgggggcacatgatattttggtatatgtgtacaatgtataatgattaaatcatggtaattgagatatcagctcaaatatttttctctgttgggaatattgcaaattcttctcttctagctattttgaaatatacattaatttttttttacttttaaaatttagttttcttggctgggcgtggtggctcatgtctgtaattccagcactttgggaggccaaggtgggcggatcacaatgtcaggacttcaagaccggcctggccaacagggcgaaaccccgtctctactaaaaatacaaaaattagccgggtatggtggcacacacctgtaatcccagctactcaggatgctgaggttgcagtgagccgagatcacgccactgcactctagcctgggcgagagagtgagactccatctcaaaaaaaaaaaaaaattagttttcttcatttcgtagtgtttggaatacaacaaagtattaactacagtttccctattgcactgtaaaatactagaacttattctttgtgtctaactgtatttttgtacgtgttaaccagcttctcctcatcctagagtctttctggggttttttgtgtgtgtgccaaatcgtggaagctagagcccttttttttttttttttttgagacggagtctcgctgtgtcgcccaggctggagtgcagtggcgcaatctctgctcgctgcaagctctgcctctgggttcatgccattctcctgcctcagcctcccgagtggctaggactacaggcgcccaccaccacatccggctaattttttgtatttttagtagacacggggtttcaccgtgttagccaggatggtctcgatctcctgacctcgtgatccgcccgcctcggcctcccaaagtcctgggattacaggcgtgagccaccatgcctggcctagagcctttttaaataggatttaaaccatttatttttctcatgatttatttttcgttttgttcctaccattttattttatatttctataatttgctttcttatgaccccccttcttcccctttttaccctatattttgctgaaattatccaggtttctttgctgctttttcctctctgctagtcatgaaaattatacatactgtttgtggctccctacattttaaaacacgtatttagacttatacttctgtaacaactttttaaattaagtagttatagcttttcaaaataaaactattagcacaacttaactttcttctccccgttccatcttccatgctttgctgaaataacctgaagccttaatctagattactatgggggattttaattagtggaatgattacgtacctatataaagagaaagaaatgtacttgaatgtctgaaaatgtctttttccttctttcttttttttctatacaaatgaaagatagtttggctggatatacagttctaatatcacagttcttttccatcagacctgtatagatgttgctccattgtatattttttaattaaaatttttattttaattatagactcacatgcagctacaataaacagtacagaaagatcctatgtactcttttcacaatttcctgtaatgataacatcttgtaaaactatagtataatatcataaccaggatattaactttgatacagtcaacatacagaaggtttccatcacatcagggatttcttacagtacatcaagataagtgtacttatacagtatgtaacctgggattggcttttttcattcaccataattatctggaaagtgactctgattattgcatctatcaatagtttgtttctttttattgctgagtggcatttgacgatgtgcatacctcaagtttgtttaatcgttcacccattgaatgatatttgggttgtttctaattttagaccattacagataaagctgctatgaacatttgtgttgaggtttgtatgtgaacataggttttcatttccctggaataaatgcccaggagtgcaactgctgagttgtatggcagttgcatgtttaattttacaagaaactgacaaactattttccagagtggctataccatattatattcccaccaacaagataaagtgctctagtttctctgcattcttgccagcatttggtgttgttacaattttttattttagcaattctgataggtttaatttagtaatttctcattgtggctttaatttctatttccctaatagctaatgattttgaacatacgtttatgtacttatttaccatctgtatattccctttggtgaaatatctcttttgcccattttctaattgaattgtttcctagggctgccttaacaacgtgccataaactgggtgccttaaaacaacagaaaatctattgtctcacaattctggggtttagaagtctgaaatcaagatgttggtggccaggcatagtggctcacacatgtaatcccaacactttgggaagccaaggtgggcagatcacttgagtccaggagttcaagaccagcctgaccaacacggtgaaaccccatctctactaaaaatgcaaagatgaacagagcatggtggtgcactcctatagtcccagctactagggaggctgaggcaggagaatcacttgcaaaaaaaaaaatagcaaggttgttccttctgagggctctgagaaaggatttgttcatgcctctcttctgatgacagccagcaatccttcagtctctgcttcttatatcactcagcattctctcctcctgtatctctctctgtgtgtctcttttcctcttataaagacaccagtcatattggattactctagtataactttaacttcttaattacatctgaattaattacatcttcaacaaacctattttcaaataaagtcacattcagaggtactgggagttatatcttcaccatatctttttgagaacacaattcaacccataactggttgtttttttactattgaattttgtgtttagatattagccctttatcaggcatacggtttgcaaatatttttttcctagtctttagcttctttcttcatcctcttgacagtttttcaaagcaaaaaaaacatttcatttcaatgaagtccagtgtatcaatttttccttttatactccttgcttttggtgtcaagtctggagctttttacctaatcctagatcccaaatatcttctcttaggttttttgtaactgtatcattgttctgcattttaagtttaagttcatgatccactttgagttgtttttttgtgtgtgaggttaagatcaagattcaatttttttgcctatggatgtcccattggtccagcactaattgttgaaaagaccatatactctctccattgagaaaggattgcacatttctcaaaaatcatttatgcttatttgtgtgggtctatttctgggttcttcattttgttccattgacttatgtgtctatccttttgctaaaaccaatcagtgtcttgattaggctatgatgagtccttacattgaatagactgattcctctccctttagtcttcttttttcaaaattgctttagctgttttatttccttgtctttctttctgtctacatttgttaaacttgtctatatctacaaaaaaaaaatttgctgggatttttataggaattatgttaaacctatatatcaatttggagagaatatctttcctatgctgagtcttcaaatccatgaacatagtatgtctctgcatttatttagattttacttgattcctctaatcatcattttgtcatttttagcatataagtcctgtacatatctaatgtcttattaaatttaattctttgtatttctttttttgaacaattgtaaatgtcattgtatttataatttcagtgttcctatgttcattgctaatttataaaaacacagttgatttttatatgtatatctggtatcctgcaaccttgctgaactcatttattagttttagaaatttttttgaagattctttgggattttgttgttgtagatgttgatgtggcaaataggctcagtttaatttcttcctttctgatgtgtatgccttttattcccttttctaccttattgcactggctagaacttccagcactatgttgaataagagtggtgagagcagatatcctgccttgttcccggtcttaggggggtaagtattcagtctttcacaattaagaataatattagctgtacagtttttgttgttattgtttggttggtttttgccggtttgttttttgtagatgctttttaacatgttgaagaagttctcttccatttctatttctgggagttttttaatttctgggtgctgatgtttgtgaaatgtgttttttttaaatcagttaatatgatcatgtgatttttcttctttagccatttaatatggatagattacattgattttttttttttttaatattaagccagccccgcatctcttgaataaaccttacttggtcatggtgttgtaaaattctatttacatattgccaaattctacttgctaatattttgttaagaatttttctgtctgtatttgccagacactgtctttatctggttttgctatcaaggtcgcattggcttcaaaaaatgccttgagaaatgttccctcccattctctgcaaaagattgtcaaggatttgtgctcattcttatttaaacttttggtagaattctctggtaaaagcctcttggcctggagctttcttttttgtgaatttttaaatgactaattcagtttctttgatagttataaaactgttcacattatctattttatattgggtgagtttttgtagtttgtgttttttgaggaattggtctgttttatttatgttactaaatttatgtctgtatatgtgtgtatacccttcttatccttttgatgtctgcagtgtctgtagtgatctctcctatttaattgttgatataggtaatttgtgtcttctctttttttttttttttttttttttttgtcattcttcctagagatttgtcagtgttactgatcatttcaaagaaaagactcagctttttgtttcattgatttttctctattgttttcctattctcaatttaactggtttctgttctttaatttttaacttgccctttttctgggttcttgatgtaggagtttagattattgatttgagattttttattttcttatgtgtgcgtttagtaccatgaattgcccactcagcactactttacctatgtctctcaaattttgatatgttgtattttcattttcttttttttttattttgagatggcgtttcgcgtgtgtcacccaggctggagtgcagtggcacaatctcagctcactgcaacctccacctcccgggttcagtcaattctcctgcctcagcctcccgagtagctgggattacaggcacctgccaccacacccagctaatttttgtgtttttagtagagacggggttttacctagttggctaggctggtctcaaactcctaacctcatgtgatccacccgcctcggcctcccaaagtgctgagattacaggcgtgagccatcccgtccagcccttttttttttttaaactgagacggagtctcactctgtcgcccacgttggagtgcagtggcgcgatctcggctcactgcaatctccgccgccaggattcaagcgatcctcgtgccttagcctcttgagtaactgggactacaggtgcgtgccaccacgcccgactaatttttttgtatttttagtagagatggggtttcaccatgttggccagtctggtcttgaactcctgacctcaggtgatctgcccgcctcggccctccacagtgctgggattataagcgttagccaccacacccagcctgtattttcattttcaatcaattcagtgtatttttaaaaatttcttttaagacctctttttgacttatagattatttagtagtgtgttgattagtttctaagtgtttggatattttcttgctacccttctgttataaatgtctagtttgattcaactatgtccagtaacacactctatatgacttcgatttttgaaaggttgtttgagatttgttttatgaccaggaatgtggtctgtcctggtgtaggtgccatgggtatttgaaaagaatgtatattttgctgttgctaggtagagtgctctatatattttgagtagatcctgttgtctaattgtgttgttgaatttttctttatccttgctggttttctatctagttgtttcatcagctgttgggagaaggttttgaagtatttgagtataattatagatttctttatatctcctttcagttcagtcagtttttccttcacatgttttgcagctctgttgttttgtgcatgcacatttaggattgctatgtatttttagtgggttgaccattttatcattaggtaatgtttctttctctctctggtaattttattttctgtgaaatctgctttgatgttaatatagccactcctgctttcttttgattaatgcttgcattacatatctttttccatccttttcaacatgcatgtatcattatttttaaagtgagtttcaggtagacagcatattattgggtgatgttttttaattcattctgccagtctctgtgttttaattggcatatttaaatcatttatacttaagcttgccattttaaactttgttttctatttgttttcactatttttgtttctgttacttgagtaattttttgaagtcctttttgattttttgtagtgttttgagtgtatgtctttgtatagttttcttactgattgctgtaggcattgtattatatatgcagtctactagtatactttaccagttcagactagaaatgttacctccttttatgtccctttatcctcccttatttttaatatgctcatcttaaatatttcctctgaatacatttagaaccgggttggacaattataatttttcttcaaccactgaatataatttagaaaactcaagagaaggaagtttattgtatttacccttatatttgtttaccatgttgtttcttccttcttgatgttccaaggttccttttcttatcatttcccttctgttaagacagcttcctttagtcactcttcaagagtaggtctgctagcaataaattcccgttgttttccttcatgtgaggctgtcttgatttcctgtttcattcctgaagggtatttttgctggatgtaggattttgggttgatggctcttttctttcagcacttgaaaaatgtgttccttccttttggcctccattgtttctgatgagaaatctgtgtctttcatattatttcccccaatggtatctccttagttgctttcaagattttttagtgttgttttaactcaattacctctgcaaagaaaaaaaaagattttgttgttgttgttttagttttcagaagtttgactacgatgtgtcttgttgtagatttctttgggtttattctctttggagtttgttcagcttcttaaatctgtacacttatgtacagattcctcagcttgccgagtagctgggattacaggtgcccaccaccatgcctggataatttttgtatttttagtagagacagggtttcaccatgtttgccaggcttgtctcgaactcctgacctgaagagatccatccaccttggcctcccaaagtgctgggattacaggtgtgagtcaccgtgcctggccctagttcacttatgctttcccctttcttctccattctgctgttgagcccatcgcttagttttagtttttttatttcaattattgtgtttttcagttctataatttccattttgttcctctttatatcttctgtttctttgctgagaatttcagtgttttcacttgtttcaagcatgttcataaatgcttgcttaaacaatttgatgacggctactttaaaatctttgtcagataattttaacatttttgtcattgacattagcatctgttaattatcatttctcatttgatttgtgatcttcctagtcttggtacgatgagtaatttttagttgaaacctggacattttgtgtattatgttatgagactctggattttttttaaacctgatgtgttaactggcttcctttgacagcactctgacagtgaaacggtgggttgtaatgctgcttcattaatgccaggtaaaggtagaagtccaggttccctatttagcctttattgacatggggggcggggacggggcaggaatgggagttccagctctcaactaggctttcactgatacctctttggctggaaaaggtaggagtgcttgttgccacttggtggtggtaaaatcccgattcttcacgagatcctcctctgtcatcaccccattgaggaggagtatagtcactttgttactgctggataggggtagaagtcagggtccacatgtagtctctactgatatcactgaggtggagcctcattttcaccatgttgtgtaaaaattccagctggccaacatggtgaaactctgtctctactaaaaatacaaaaattagctgggcatggtggtgggcgcctgtagtcccagctactcgggaggctgaggcaggacaatcgcttgaacctggaaggcggaggttgcagtgagccaagatcacaccactgcactccagcctggtgacagagcaagacgccatctcaaaaaaaaaaaaaaaacagatttcagcttcctacttggccttttctaacactatcccagcaagatggctggggggcatctcgttacatcctggcaagagtgaaaatctaggctctgccttcagcctttgctggcatgtctataggggtgtggccatagttttttctgggttgtttagctgaagtagggcaattcttgtttaaaagctttcagtcttgttaactactccttttgtcatcctttggctagagagaacacgttcattagggcttttttttttttttgtcttcacctgttgacattcttgtttgccaactttgccagctctaagtctgggatataggagacaaaaacaaagcccagagaactcgttaacatgtggttccttgggtccccaggtccctagttagtgtgctaccttctgtccaacttaatgtccatggtttttagttatatttagctggataaatagggaaatgtatgtctatgccatctttctggagtcagaagtctacctgactgtcttttaatggagatacagacagtgattccattatcttttattgttgcattttagttaataatgaaaactaacatttctcaagtacacagtatgtgcccaggtactgttctaagtgctttaagtgcttttcgtgtgttgagtcatttaattcccttaaaactttatgaaatagttactagtattattctgtcttatcagatgaggaaaccgagacatagaaaagataagaaacaagccccaaattactgacaaatccgtggttaaacccctggctctctgactccataagcccactctaatactcatggcctaggataaatctcaaatctatatgctttccattataacaactttttttttttggaaacttatcacagtttttctatcctagaattcagaaattttactaggatctgtccaaatataggtcttatttttaaaataattctctctagaacccagtgtatccatttcatcagaaagcttaggtctttctactgatcagtgacatgtttttaaaatttttaatctttcctctcatccacccactcaagaaaagattttgcagaaggtgtttcatgtggtcataaagatactcaataaataacaaagaagttagttccttctaatatgtcaaaagctttctcttttagagatagtcttgctttgtcacccaggctggagcgtagcagtgatatcatagctcactgtaaccttgaattcctgggctcaagtgatcctcccatcttagcctccagagtaactagtactacaagcacatgccaccatgcccaactaattttttaatttttatttttatttgtacaggtggggtctccctgtgtctcccaggctggtctcaaatccctggcctcgagcagtcctcccacctcagcctcccaaagtactggggttacaggcatgtaccactgcacccagcccctttctgagcattttttttttcctttgagatggagtcttgctctgtcccaggctggagtgcaatggtgcgatctcagctcactgcaacctctgcctcccaggttgaagctaatctgcctcagcttcctgagaagctgggattacaggcgcacgccaccaggcccatctaatttttgtattttttagtagagacggggtttcaccacattagccaggcaggtctcgaactcctgacctcgtgatctgcccacctgggcctcccaaagtgctgggattacaggcgtgagccaccgcacccagccacctgttacattttttattctttctttcttttttttttttttttttttttgttgccaggctggagtgcagtggcgcaatctcggctcactgcaacttccgactccatggttcaagggattctcctgcctcagcctcccgagtagctgggattacaggcatgcgtcaccacgctcagctaatttttgtatttttatagagacagagtttcaccatattggccaagatggtctcgatctcctgacctcgtgatctgcccgcctcagcctcccaaagtgctgggattacaggcatgagccactgcacccggcacttctgagcatttttgaagcaaaactagaatattgactcctgggaagatgatatggtattgtccagggaacaggaactggtctaagaagaatgtggctaccaagcatgctttgaggaatgctactgcagccccatttagctgtggtgtattgtgttaaactcaggtcatgtaggcatccaaatctcaagtaatctgtccctcttagaacttcttggttctaagattgctgataaaatactcaaatcttcttgtcttttttttttgttttggtttgattttaataaactgactgggtggtttgaaatttaggctgaggctagagatttcaagaactgaatttacataaggggaaaaaaaggctttcacgtgaatgaagttggaaatgccaagtaagctacaacagtgtactgtatgttctatttctcctcttcactcccacaaggagcaattactaaataacttatatttgtaagacttcaatagcaaagaatgcatattactaagatgatatgtagccttttatcaatttattttaaaagattaatacttctggtgaaaatacattatgataaaaattttgtaaaaactaatgtgtcactggatcaggattaacatcttggaatactctaccatctacttaaaattgttgggccaacatatcaattgtagtgaagccattttatttactaaaacaaagagagaaaaattcctaaaatatattcgcatcaacatatcttctaccagcctggatccctctggtaattgggatttattaaaaggccctgccaggtagtgaggactcacaaaagtctcaacatccagcccccagcagcactaaggcagatgtctcttccctctgatgacagtgctactacctctactgctgtgtgtgtctgagtctttgtacagaatgctacaagaattgtaccaatttcaagaactctgcagggcaacattcccacaccactggcctcactcctagctagcctgtattaatggctgcctttggccagacatggtttctagttcctgcatctggaggccaggttggcaggccacctgacagaaagctgtcagtgcatgcagaagagctccctgtggaaggggcacttggtttggtggaatcctctccagagacatgatttttgtcaaggcttcctttatggtatttactactttcatttaatgtcattccctttccccaaacacacacacacacacacacacacacacacacacacactaaagccttaatagttttgtcctctttgagttttcagacacttcattatctgctatctcattttatcctttcaggaattccttaaagttgttagattatcccatttgaatatcccattatcccatttgaaagatgagaaaattgaagtatagatgggccaagctctgacatttagctagtgacatcctgggagcaagcatccagctttgctgactgcaaacctctccgtctttctaccataccactttctgtcacttgcctatttcctcttagcttgcccagtacagatgtttattctcttattttcttcttttttttttttttttttttttttttgagatggaatctcgctctgtcacccaggtagagtgcagtggagcaatcttggctcactgcaaccaaccacctccctggtttgagcgattcccctgcattagcctcctgagtagctgggattacaagtgtgtgccaccacgcccagttaatttttgcatctttagtagagacacattgtcgccatgttggccaggctggtctcgaactcctaacctcaggtgatccacccacctcagcctcccaaagtgctgggattacaggtgtgagccactgcacctggcctaatcccttattttctaaggtgagagatattttaccaagccagtcttgtctggggagggatatttctaagggattaaaggacagccatctaagtcttggctataacaagggtcatcaagtgaggccctgtcagcaatatgaaagttaagagctgagttttgtgccctgtaattttctaatagctccacagcgtatgtgctatgtatatttggtaaagcactccttaactacatccttccttcccttcgtaagaagatctgaatgtaggaaaaaggaaattaaatatgtatttgagtaaaagcacttgctctaactgagccaacccagaaaatggccaaaggttcaaaattaaatattacccattatttatgtttggaagctgtcagagaagaatttacatgggatgaagttgttctttgcaggtactgacttcctgatatatgttactagagactggaaactaatcataagatttagatttcagatacagccagttagcatctcagtggtgtcaacagtataaatatactcttctgggaacctacaagaaaactaaaaatctgtgaacacatttttaatttaccatgcataaataaaagtagaagttttctttgcttggtagagttttgtttgggtttggatttgtagtattcatagttataattccattgtcaatctttggtcttaataagcaggcctggcaggaactctttattttgtaaggaatcaaaatgacaaactacagcttatcacttacaggagaggcatcctttatctgtggaattttaactgtagtaatcagtaagtattctcaaacaaactgacagaaatagtccttttttttaatgtttaaacaacacttactgtttctgattataaaagtaacacatgagcaaggcagtggagcatatggactgagactgctgagtttggagttggagaggctctggctgtgtacataccgggtcagtcatggccatgggaccagaactgtctaagcttcagtttccttgtgtatagaatggggagaaattggccgggcacagtggctcatgcctataataccagcactttgggaggccaagtagggatgattgcttgagcccacgagttcaagaccagcctaggcaacatgctatctctacaaaaaaatttttaaaaattagctaggtgtggtggcacgcgcctgtagtcctagctatttgggaggctgaagtggaagaattgcttgagcccgggagattaagactgcagagagctgagatcacaccattgcactccagcctggggtgacagaatgagaccctgtctcaaaagaaaaaaaaaattacttgaaaatgttttcatgaccctttaatactataacatatgactatataattaatcatatttccttgtgagatatctcagttatttctaatattttaccattataaatattgttacttcaagggttgagttattaggttaaaggctaaagagtttgaagaatcttaaaactttttttctttttgcacttctctgaggttgaacattttcatgtttattaattactggcattattttagtgaaatgccttttagtgaataaatgcaacttgcaaagctttttatattggatctccagtctctgaaatagtgccaggtacataatactcagtaaatatttggcatggtgaatgaatgaatgaatggcaagaatattaacactttgtctaccatatttgtttcagatgaggtcattgtgcctctatacgtgcacaatgataatgctgtcttggttcttagtctttacctattttttttccattcttttcttcccccacagttcatccatgagctcggatttcccacattacaacttcaggatgcctaatattggattccagaatctgcctctcaacatatatattgtggtttttggtactgctatatttgtcttcatccttagtttactcttctgttgctacttgattaggtaaccaattttcattctatgttacttcaaaatatgttaaataatcaataatcaagtttctgtcctcagattttttttaaaatgaagtatgataattggcaaatttttaaaaaattaagatggcttaccgttttaatctgtgcattagtaatcagtaaaacacctttatatgatcttcaatcttatctactgatgaagtgttttactctgtaggagaaaattgtccttatttatttttctgcccttctacctggtaaacagatacacgtatgtcattgtctatctccaagatttaatctactctcacagagatttcaaaattgcttttcaaggtgtggcttccttgttagctaaggtcattaggtatcagaaaagtagggaaggctgggcgcagtggctcatgcctgtaatcccagcactttgggaggcccaggcgagtggatcacctaaggtcgggagttctcgaccagcctggccaacatggtggaactccgtctctaccaaaaatacaaaaattagctgggcgtggtggctcatgcctgtaatcccagctacctgggaggctgaagcaggaaaatcactggaacccaggaggtggaggttgcagtgagccaagatcgtgccattgcactccagcctaggcaacagagcgagactctgtctcaaaaaataaaataataaagaaacataggggatgctccttatatctcatagatatgttgactgcttatgacttttatttcttcctccaaattaattaaatacttgagacaaatataattgtaatctacagaaaaaacctttataaaacctgtttatttccagaaattcctttttctgacatttctattaaactattattaaaataattagatcagccaggtgcagtggctgacgtccaaaatcccaacactgggaggctgaggtgggcggattacctgaggtcgggagttcgagaccagcctggccaacatggtgaaacccagtctctactaaaaatacaaaaattagcgaggtgtggtggtgggcacctgtaatcccagctacttggcaggagaatcccttgaacccgggagggagagattgcagtgagccaagatcgtgccattgcagtccagcctggacaacaagaacaaaactccgtctcaaaaaaaaaaaaaaatagtttgatcacagtgttctaggacaatgggatataaatatcatccaaaaatgtaattaagagtaaaaagtttagcactgtgtaaagtaactgttaactgaagaagtcccaaaaaaagtactgccacttttaagttctagacttggggtgtttgtaattgtaaacaccaaagcatttgtgtttgtctatttgtagacaagcaccttccttagtggaaagaaaaaaaaatgaggtacatatatgtaaatacttgctgcagcatttaatatatttttgtgttacactttttgttgcatcgtaaacacatttattattaccaatggacaatgagttctttattgttattattattattatttgagatgggttctcactctgttacctaggttggagtgcagtggcacagtctctgctcactacagctttcctcctaggctcaagtgatcctcccacctcagcatcccaagtagctgggactacaggtgcctgccaccacacctggccaattttttttgtatttttggtagaaatggggatttgcaatgtttcccaggctggtctgaaactcctgagttcaagcaatccacccgcctcaacctcccaaagtgctgggattacaggggtgagccaccacatctggctagacaatgagttaagactgttcaactagttcagatttttacatctctttctagcaagaaaagacaaggttttgtgtgtttatacaaatgttaatattactgcaattccaatataataaagcactcaaatataaattaataatagtttgataaacattatgtaaatattcagcattttttaaaattagagaattagccatagcatatataggacctcagaatataaaaatatggtttttttttcagacttactagttttttttgataattcctctacgaatgttgatttaacttagaaatatgtaaatttaatattcaaaaccaaattattttttaaagaggcaaaaaatataaaaatataacaaaatgtaaaaaaaagaaaatgttattaagggagggttatcatatgtaaaatatttaattctaaaatatatagctcataatatagttttcattactatgtcaaagaattaagtaagcctttaactttaaacaaacaaaaacccactaatgtaccaatttgtgattctgggcaaagtttttgaaaagtaagttatgaaacacccttttacctcattgtattccttttaataatcaagcaaataagtaaagtgataatgaaaaaataatgatatgtacttaattttatccttttgtatcttttttttttttttcaagatagtgtctcactctgtcacccaggctggagtgcagtgacatgaggctcaccaaagcctcaacctcctagcacaagtgatcctcccatctcagcctcctgagtagctgggactctagacacccaccaccacacccagctaatttttttattttttgtagagacgaagtctcagtatgttttccagactggtctccaactcttgggctcaagcagtcctcccagctctgcctcccaaaatgctgaaattataggcatgagccaccacacccagccttatccttttttataatcagcctaacaggccgggtgcagtggctcatacctgtaatctcagcactttgggaggccaaggcaggcggatcacttgaggtcaggagttcaagaccagcctggccaacaagtgaaacaccatctctactaaaaatacaaaaattagttgggtgtggtggcacacgcctgtagtcccagctaatcgggaggctgaggcatgagaatcgcttgaaccctggaggcagaggttgcattgagccaagattgtgccacactctaccctgtctcaaaaaaataaaaattaaaaaatttaaaaataagctaacaaagcaaagaaattaggatctgttacactaaaattgaattatcatgtttaatcagaaatgttcaaacatttctaaacttcatttactagtcattggtacgattgttttttgttttgttttgttttgttttgagatagagtcttgctctgtcaccaggctggagtgcagtggtgcaatcttggctcactgcaagctctgcctcccaggttcacgccattctcttgcctcagcctcccgagtagctgggactacaggcgcacgccaccacgcccagctaaattttgtatttttagtagagatggggtttcaccatgttggccaggatgttctagatctcttgatcttgtgatccgcctgcctcagcctcccaaagtgctgggattacaggcatgagccaccgcgcctggccaatttttaaaatttaatcatgaggtaaggagctttcctttgtgatgatcctaatttgttacctttaacacttcaaatggtaaattgggatttaacaagtctttgcagttaatctagagatctgtggagtcagctcctccagaattaccctagctcattttttatgataacctaagctctccagcaccttcccaggaggttcttctgttctccagagagctccctccagtcaccaccactggactcatcagaaccataggaagactataacttaggtctaaacaagacagtcactaccaaccacagtcttacacaggattgtagtatagaatgtgctgactatggtagggctgtgaacagggcactactggagcacaaaagaagggcatcttaccttgctaagaaagatcctgttttataatgaattatataatattctaatttatgtttgttcatattttttccctgatggttatttgttgtgtttgttatatctcaaacactcagaatcgtgcctggcacgatattaagcactcgataagtatttgctgggtgaatgaatgaacggttccctagtaggaagtcattagatatgcctaaaactaaaaaatcaagaagtaccaacacaggcaagttatttagaaacatgaaagtcaggatcaaaatagtgagctaaagggggaaaaaatgggttatctcttgagaagagggcagaggactgctgattttttgttattaaccctgtagagccacatatgacaacatatgtaacttggataaaattataaacaaaaaatagaggggtgatgcataccccagttaccctgatttgatcattatacgttgtatgcttgtatcaaaatattacatgtaccccataaatagtacaattattgtgtattatgttttaataatactcaaaaataaattttgaagaatacagggaaattttggggctacagttattatgaggtcatgaaccaagataatgacagtagatctagaaaagatgttgtggttgtaagaaatacttgggaggtgaaaataaacagaaattaatgactggacattaaggacagaaggggtttagaatctttcttggacttctggcttaggcagctgggtagatagcaatcccttccgagagatagaaaatgaatgggcacattttaagtgaaaagatgatagattccatttcagagatgggggtctgaagatgtttaatacttagttggatgtgtagctctaaagcttgtgagaagtctgatctggaaataggaggtcatgtaattaataggtagaagctgaagccaggagtgttgcctagagagaatgtgtatagtaaaataaaatgggcccagggcagaatcctaaggaaacattgatatttaagaggagcccttaaaagagactgagaagggatagcaggagataagaggaaaatcgaggctgggaatggtggcttacgcctataatcccagcactttgggagaccgagctaggtggatcacctgaggttaggagtttgagaccagcctggccaacatggtgaaaccccatctctattaaaaatataaaaattaaccaggcgtggtgtcacatgcctgtaatcccagctactcaggaggctgagacaggagaatcgcttgaacccagaaggtggaggttgcattgagctgagattgcgccactgcactccagcctgggcaacagagcagactccatctcaaaacaaacacacacaggggcacagaatattgtgagaaagatgccctacaagtagtgtttcaatggattgagtcaattatgtcagctgccaacaaagaggataacaattgaaaagttcacattacatttgacaataaggttttgcatccttaatctttggtagaaaaatttcagtagcatagggaaagggatggtagaggctataatggggcaaaacctggctagtaggtgaaagtggatacaaggaatataactctgtctttgaagaaccttggctggaaaagattaggttgaggggaggagttgctgtagaatcaaggaagtattttagtgctgggtttttttgtaagatagagattttggtatgtgtatgcatatattaaggagaatgagccaattgtggaagatttataagaaagaataaatcatagaggtgaaaagagacacacataagagagatagcaatattattcctaagcaggagaacaccttttcctaagacagagatgagggtagctgtagaaaacaaaatatattgtagccatgtggagctgggagtgagaaagcttgcatacatcacagccccctttatttgtgtagtaaaaaattgacagttgaaaattataggggaggaagtgatagggtaacacttaaagagagtggcaagggtttgaaagaaccactgcatgaaagcttaggatactgagcatgaatagatagaaggattagagagcaatgtggagaatcaggctgagactggagaccacaaatttgcagtggccataagctacacggttttatcatttctctagcactgttcagcattgttaatcatgccttcttaaatactttttagatatctatttagcagtgcaaaataaaatagtgcaatgtaaaatattagataattaatgggagttagagtaatggaggaatcaaattaacttcatagaatgaagttaatttaagggagaactttctagaagggatgaattttgagccacagatggaagaaaaaggtgagcacaaattgatccatgctgtagctggaagtaacaagttcagttttgggaaaacatgcagatctaattaaaagattcaaacaagcaaaatgaattaacaaataaagcctcattttaatgacttctaatggaattcattttatttattttttatttttattattattatttttttttttttgagacagggtctcagcctgtcacccaggctggagagcaatgtcatgatcatagcttactgcagcctcaacctcccaggctcaagcaatcctacctcagcctctcaagtagctgagactataggcacacgccatcatgcctggctaactttttttctttttttgagacagtcttgctctgtcacccaggctagagtacagtggcatgatctcagctcactgcaacctccgcctcatgggttcaagcaattctcctgcctcagcctcccgagtagctgggattacaggcgtgtaccaccatgcctggctaatttttgtatttttagtagagacagggtttcaccatgttggccaggctgatctgatctggaactcctgacctcaaatgatccacccgcctcggcctcccaaagtactgggtttacaagcatgagccactgagcccagctgatgcccagctaatttttcaattttttgtagagacagagtcccactatgttcctcagcctgggcttgagtgatcctcccacctcagcctcccaaagtgctgggattacaggcataagccaccatgcccggtccattttatttctttaggtgaaaatagtttctttatgtgaaaatggtattttttcatgtaaagaaataaaatgtaaaacaagcaaaaaccctataaggatatagattatttgaactacataattaataaacttatgagaaagctatagctttaaattcatatattaggcaagaaagactaaaaccaatgagcaacgttttcatggagctaaaataaaaggccagttaaacccaagaaaaaataaaaggaagaaagtaaaaaagctaagcacgatatcaatgaactagaaaataaatgtataatagtaaaaattattgagaccaaagctggttctttggaaaattaataaaattgttaaatctctagaaaaactaatcaggaaaaagaggaaagaaaatatacattataaaatataatttactaaaatataaattactaatatcactaatgaaaaagggacattattacaaatcctataaacattaaaaggtcacaaagaatattatgcatttatggcaataaacttgaaattttgggtgaattacatagattcctaacaaaaaaagaggtgtatcaaaactgacacaagaaagggcatttattaaaaaaaaaaaaacacacacacaacttaacattgtactttctggtaatagacggaaagctttcccctaagatcagaacacaataagaatgcccactttaccactactgttcagcattgtactggaagttctagccagaacaattaggcaagaaaaagaaatagaaggcatctaactagaaagaagtaactatctccatttgcagatgatatgatcctatacagagaaaatcccgtaggatccacacacacacaaaaaaaactactggaactaataaattcagcaaactttcagagtctaagatcaatacacaaaaatcagttgtgtttctgtgcatcaacaatgaacaatctgaaaaggaaataaaggaaacaatcccatttacaatagcatccaaaagaataaaattttaaggaataaagttaaccagggaagtgaaagacttataccctgaaaactacaaaacattgctgaaagaaattaaagaagacctaaataaatgtaaaggcaccccatgttcatggatttatatcgtctttatatagttacagtgtcaatattttccaaggcaatctacagattcagtgcaatccctatcaaaattctaatggcctttttttacagaaatagaaaaagcaatcctcaaattcatttggaactggggccccaaatagccaaagcagttttgaaaaagaaaaacaaatagaaggactcacacttcctgatttcaaaacttcagaaagctactgtaatcaaaaaattgtggtactggtataaagatagacatataaaccaataaaatagaattgagagtccagaaataaatccaaacatctatgacaaattgatatgcaaataagggtgccaagatcattcaatggggaaagaattgtttcttcaaccaatggtactgggaagctggatattaacatgcgaaacatttgtacatcaaaggacatcaagaaagtgataaggcaacctacagaatgggagaaaaatatttacaagtcctatctgataagggtttaatacccagaatatattaaaagctcttaaaatttaacagcaaaaagacaacccaatttaaaaatgggcaaaagacttaaacaattctccaaagaagttacacaaatggccaacaagcacatgaaaagatgtttgacattattggtcattaaggaattccaaattaaaaacacaatgagataccacttcacacctactaggatgctgtaatcaaaaacagaaaaataacaagtgttaatgaggatgtggagaaataagaacttgcatatattgctggtagaaatgcaaaatgatgcagctgctgtgaaaaagagtttggtggatcttcaaacaaattcttttttttttttcttgagatggagtctcgcactgtcacccgggctagagtgcaatggcgcgatctcggctcactgcaatctctgcctcccaggttcatgcaattctcctgcctcagcctcccaagtagttgggattacaggcgcctgccaccacacccagctaattttttgtatttttagtagagacggagtttcactatgttggccagacttgaactcctgacctcatgatccacctgcctcagcctcccaaagtgctgggattacaggcatgagccaccatacctggccagttcttcaaaatattaaaccatgtgacccagattttcattcctaggtatatacccaagacaaatgaaaatatatgtccacacagaaacgtgtacagaaatgtttcataatagccaaaaggtataaacaacccaaatgtccatcgacagatgaatggataattgtatgtacatacaatggaatattattcagccataaaaagaagtgaagtactgatacatactacaaccaggatgaacctcaaaaacatgctaggtggaaagccatacacaaaaggccatatattgcattgttccttttatatgatatatccataataggcaaatctatagagacaaaaagcagataagaggttgcaggggatagaagtaaggggtaatggggagtgatcagtgaatggggtaccaggtgttttgttggagtgatgaaaaattttgaaactagagatagctggtagatggacaacattgtgagtacactacttaccactgaattgtatacttgaaggcggttagttgtaatgtgagtaaaaataaaagaatgaaatttttaaaaagaaaaaaccggggccgggcatggtggctcactcctgtaatcccagcactttgggagtctgaggcaggggatcacctgaggtcaggagttcgagaccagcctggccaacatggtgaaaccccatctctactaaaaatataaaaattagctggacgtggtggcacacacctgtattctcagctattcaggaggctgaaacaagagaatcacctgaacccgggaggtggaggttgcagtgagccaagattgtgccactgtactccagcctgggcgacagagtgagactctgtctcaaaaaaaaaaaaaaactactacaagaaattgaaaatatgaataattatatatctaatacgaaaaagagacagatcacgaggtcaggagatcgagaccatcttggccaacatggtgaaaccccatctttactaaaatacagaaattagccgggcgtggtggcatgtgtctgtaatcccagctacatgggaggctgaggcaggggacttgcttgaacctgggaggcggaggtggcagtgagctgagattgcgccactgcattccagcctgggcaacagagcaagactccgtctcaaaaaaaaaaaaaaagagagaatgtgttttgggccaggcacggtggctcatgctgtaatcccagcactttgggaggctgaggcaggcagatcacaaggtcaggagatggagaccatcctggctaatatggtgaaacctcgtctctactaaaactacaaaaaaaattagccgggcgtggtggcgggtgtctgtagtcccagctactcgggaggctgaggcaggagaatggcgtgaacccaggaggcggagcttgcagtgagccgagatcacgcactgcactccacgctgggtgacagagtgagactccgtctccaaaagaaaagaaaggaaaattgaatgtatttttaaaacattcccacaatgatattttaagccaagtaactcatccaaacatttaaggaaaaaaataccactccaatatgacacttccagagaataaaagtggaacaaatacttctcagctcatttcatgaggccagcataattgtgatttcaaagcctgacaaggatattatgagaaaggaaattatagaccgatccttttcatcagcaaaatattgtaaatcaaattcagggatctacaaaaaaggtagaatattacaaccaaatgaggtttgttccaagaacgagagttattttaacatttgaaaagcaatcaatacaatatagcacattaatagtataatatcataaagcattgataaaatttaatacctattcatgattttttttggtaaactagtactacaagagaactttctaaaatttgaaagagtatctacaaaaaatatctaaagaaaacatcatacttaatagtgatgtattgatagggacattcactatcacttttatttagcatcatactggagggcctagctagtcagtgcaaaaaaaaaaaaacgggaaaaaagaataaaagaaaagtgtatttagaaaagaagcaaataaagattataaaggcagtgtttaaattgtgattatatgcagacaacataattgtgtacattaaaaaatccaaaagtttttacagagaaactatttagaattagcaagccaccagatacaggatcaatatacaaaaattacttttttccatataggtagcaagaaataattagaaaataaagatttttttcaacactatttacagtagcatcaaaaattaccaaatgtctaggagaaatgtgtaagagaaaaattaaagctgtaaataaagaaataatgttcataggttagacactcagtcttgcaaagatgtcagttcttcctcagttggtctgtgaattttgtacattcttactcaaaaccccaagagggtttttttttttttctggtggaaattgaaatctatatggaactgcagagaaccaagaataaccaagccagtcattcaaaagaataaaacttgaggacttttgctaccagaccccaaaacctgttttaaagcaacagtattaagagaaagtgctgttcaccaagcacccagatctcaagttctaaatacttttctccaataaaaggaattagggttccttggaagaagtggctaaccccagggctggaacacagaacatataaaatgagcctgaaacaaacatcttttggtgccagtaaatacggaaatgcatgggaaaggatgggggcttgttgaaagaacacaagagtcagcctgaaggactcaaggccaatcaatttgagcaacaaaaagtagtgatcatattgaactgtaactcatagattacaaccaatatccatgagtctagactgatagaaataaataattgcacaaataaatgaagaagcacatctcttcccatagattaagaccaatgtccattagtctagactgatagaaataaataattgcacaaataaatgaggaagcacatctcttccttatagaagatttccagttaataaatgtgcaaggaattagagaactacaaaaccaccattagagtttaggcaaacactacagtaattattgcaagcaaggtggatgctaaaatcagtgggcaaaagcttgagaaaataatagagtatatgtataatttcagcgtgtctccctcaagatacactacagtggagaaacccagtggacactatcttaaccaatcttaaattgaaatcttcaaattccaccaagaaagaatgatcatacttaatatgtcaaaatcttgaaagacaaggaaagactaaggaactctcaacaaattagaggtggctggcctggtgcggtggctcacgcctgtaatcccagcactttgggaggccaaggcaggcggataacgaggtcaggagattgagaccatcctggctaacacggtgaaatcctatctctactaaaaatacaaaaaaaattagccgggcatgttagtgggtgcctgtagtcccagctacttgggaggctgaggcaggagaatggtgtgaacccaggaggcggagcttgcagtgagccgagatcatgccactgcactccagcctgggctacagagcgagactctgtctccaaaaaacaaacaaaaaattaaaagtggctaaggagacataactagatgcaagatgggatcctggattggataatagaacaggaaaaggacatgagagaaagaactggtaaaattcaaataaggtctgtagtttagttaataatatatcaatgttatatcaatactaatatatcaatgttaatttaatggttttgataattgtactatggttgtataaaatgtggacatagtatatacaactatggttatataaatgtgaaagctggtagaaaggtatatgtgaattctattttttgcaacttttctgtctaaaattatttcaaaataaaagtttttaaaatagcatgatattgacacaaggtacattggttgcttagtgttgctgtaacaaagtgccacaaattgggtaacttaaaacaagagcaatgtaatttcttacaattgtgaaggctagaagagttcaaatgtaaagtgctggcagagccatgcttcctctgaaggctctaggagagagtctttcttgcctcttcctagcttccagtgagtaccagaaagccttggcattccttggcttgtagctgcctcacttcagtctctgtctctgtgttcacatggccttcttttccgtctgtctctgcatatcctctcctcttcttataaggatagcagtcaaattgaatttagggctcatcttaatccaatataacctcatcttaactaactaataatctgaaaagaccctattttcaaataaggttatattctgaggttccagtttgacatgaattgggagctgaggcggacacattcatcactatacaaggataggcaaatagaccaatggagcagaataatagcagctctagaaatagaccgacatattcaatacacctgatttacaacagatgtgtcactgcagtgcagtggggaaaggggagaatcttttcaataaatgatggtgaggcaaatgaaagtctatatgaggataaaaagctacctcacagcatacataaagaccaatttcagatggatcatagacctacatttgttaggtaaaacaacaaattgttttcacaacatactcaggagaatatcttcatagttttgggataggcaaagatttctttaatgggacataaaaagaactaacctaattgggaaaagttgataaattagacttcatttaaatttaaaaatttttcagacttaacctacaaagatgtgaacacctagaactctcataaactacccatagaagtaaaattgttatgagtactttatttttttttatgacaggatctcactccgtcacccaggctggagtacagtggcacaatcccagctcactgcagccttcacctcccaggctcaagcagtcctcccacctcagcctcccgagtagctgggaccacaggccacacgccaccatgcccagctaattgtattttttgtacagatgaggttttgccttattgcccaggctggtctcgaactcctgggctcaagcgatcctcctgcctcagcctcccaaagtgctgggattacaggcatgagccactgtgtccggccagggtgagtacttttatttttttcaagacaaagtctcactatgtcacccaggctggagtgcagtggcatgatctcggctcactgcaacctccgcctcctgggttcaagtgattctcctgcctcagcctcccaagtagctgggattacaggcatgtgccactatgcctggctaatttttgtatttttagtagattcggggtttctccctgttgaccaggctggtctcaaactcttgacctcaggccatccgcctgccgcggcctcccaaagtgctaggattacaggcgtgagccacggtgcccagcctcggtgtgagtactttgaaccagcagttctactcccgggtatatacttaacagaaatgagtatatatgtccactaaaagacatgtagaatttgtgtatcagctttaataatagcctcaaacaggaagtaattaaatattcatcagcagtaaaatggataaataaatggtattatattcatacaatggaatactgtatgtcagtcagaaagacaattactacaacaatatggaagaatctcacaaggcattgtagactgaaagaaaccaaacacaaaagagtatataccaaacgatccatttacatgaagttcaaaaacaggcataattaatctacagtgttagaaatcaggatagtgctacctctggggcatggatattgattaggaaggatcattttagagggctcaggtgtgctggaaatgtaccatgtcttgatatgagcaacagttatcctggtatgtacattttttaagattttgagctgtatacttaaggtttttatacttcattggatgtatgttatacttaaattttttctaattaagaaaaaatataaatattattgaaataagtagactgtcggtataaaaagaattgagtcatcttacgtttgggtaacatttcatggttccctgggcactttcacatagcatgttaagagatacatcatttgggtgtatttcagggtaaagattctaatttatatcatttgagccataaatgttataaattaataccaaaatcagcaactttttatttttcttcaagttactatgttggaaatctcaatattgcattactaatttctgtcttttaggctaagacatcaagcacacaaagaattttatgcctacaaacaggtgagaaatttaattcagattggctttgattttttttttccccccaaaaaactgagaactctgatttccactcatacgttaaactgggactgaatttacttgtgttcattttagcatctcactgccaatttgcagtataatatatcaacttcattttcttaagtattcttctcttcttttttttttttttgagacggagtttcgctcttgttgcccaggctggagtgcaatggcgtgatctcggctcacagcaacctccgccttccaggttcaagctattctcctgcctcagcctcccaagtagctgggattacaggcatgcgccaccacgcctggctaattttgtatttttagtagagacggggtttctccatgttggtcaggctggtctcgaactctggacctcaggtgatccgcccgcctcggcctcccaaagtgctgggattacaggcgtgagccactgtgcccagcttttctcttcttttgtaagcattacttgaagctgtagaaagttcagatgatataatttaacaggaaacttgagccaacagattgctaaagagaaatgctatagcttgtaattcttaaagttactgtcgacttaatggagttctgagataccattaagtgaaatttttccttccttctttattagaagacatagcagttcctcggaggtgagcgaccagctgtgttacagtgatctcatctactcccttttgtactttaaatgttagctcatattatccactagaagtctgcaaacttggatcatagctgtcaatacctagtccttcactgattttgtctttaagttaatacacttatcttttctcaaaggccaagtaaaattatttttttcttccaaacagggggcctagattttcctttggctctaagcatgaaattcttaatttttgttacccttagctttcttcttgggtacaggggagcttcagcttatttgagtctttaaccttgctgacgctgatgttatggaactgtaacacttcagaactgcgtatcttgtttttgtttgtttttgagacggagtctcgctctgtcgccaggctggagtgcaatggcaagatctcagctcaatgcaacctccgcctcccgggttcaagtgatctcctgcctcagcctcccaagtagctgggacgacagccatctatctgccacaacgcccagctaatttttgtatttttagtagagacaggatttcaccatgttggccaggatggtcttgatctcttgacctcgtgatccacccacctcggcctcccaaagtgccaggattacaggtgtgagccaccgcgcccagccaggactgcttatctttctgttcatctttcgtccatgtatgtttgaaatctgagctcactggcacattccctagatggacatactgatgtccttaggtaaccccacactcttacaggtctcatgtgggatccaaaatcagagttgagtattttagttttctaaatgaatgaatctttttgtctcagtcctatcataatctttttttttttttttttttgacggggtctctgtcacccagactggagtgcagtggcatgatcacagctcactgcagccttgacctccctgggctcaggtgatcctcccaccttagctgagtgtggtggcatgcatagctggggctacaggcgcacaccaccacccccggctaatttttgtactttttgtagagatggggtctccccatgttgcccagactcctatcataatctgttttgttttgttttgttttgttttgagacagggtctcgcttctgtcacgcaggctggagtgcagtggtgcaatctcagctcactgcaacctctgcctcctgggctcaggtgagcctcccaagtagcagggattacaggcgtgcaccaccacacctggctaatttttgtattttttgtagagacagggttttgccatgttgcctaggctggtcttaaactcctgggatcaagcagtccgcccacctcggcctcccaaagtgctgggattgcaggcatgagctaccgtgcctggccacgtattataatcttgacagcttacaagatatttgtatgtaggctaactagaaagtaaaattggcctttgcagtcatttaagtgaaattgactgataaaactagacaagtcacaagacatacagtaaatttgatctttaaaatatactggataggaaatttagtatatccctgtgaggccttatagtagcttctggtgtgatttctgaaaacaggatttaccctcaaatccatttttagttcaggaatgtaagacaccaaaatttagagattttccctcaaattttacttgcctattttcttcactttaagatgaaatataactctaataagctatatttagtctcagagttttttcttaaatagtaaacttccttcttatcacttggcattcattttaactactgtctggtcaccacggagtcaaaactttcaaaattaagattgacttactttttttttttttttttgagacggagtttcgctcttgttgcccaggctagagtgcaatggcacgatctcggctcactgcaacttccgcctcctgggttcaagtgaatctcctgcctcagcctgccgagtagctgggattataggcaggcgccaccacatccagctaatttttgtatttttagtagagacagggtttcactatgttgaccaggctggtctcaaactcctgacctcaggcgacccacccgccttggcatcccaaagtgctgggattacaggtgtgagccactatgctcggccaaaattccttttttaggagaatattgcatcattgctcaagttaaaaaaatgttgctaaaatgatctgtctcaaactgtaaaagaaattcccttcaatattgaatatgagggaaatgagccatatatacaaaagaaaaatatttgagaatataatgagaaatatttaaagttacagatttaaatgggcataagaacatacttttttgtcttacaggttatattaaaagagaaagtaaaagaattgaatttacatgaggtaagttgatgataagtaaatcctcttgagccattttctagtagcagtggtatgctgtggtatgtttaaacacttttattctcagtagttgaaaaaaataggcttattttgattggggtaatagaatatttcagggtgaggtcacataaaaatcaattgtgtgaaggctttacgagagtaatataactcatacttttaatagtgatgacaccattataaaatttcatagcagtagggatgctgcttgccgtccatgctgtatgaataggaaacagatacgttagtttttctactcaaggtgagtatgtactaatttccccattgaaaatgttcccaatatttctttcttaccaatggtacaaaaaagagagcagttatctcatgggggtagggattgaagaaggtaagacatacggaacaggggaagaacacacaggtagcgatatgaatccttgggattgtttagctcttcggttgcatggttgggacataggtgctttgtaacttaagtacaaacttgggtgtgtatatcctgctgtatacattaagatacatagcctataagaattctttttcattctatttcttgtgttgcctctgactacaaactttcagaatttttattttttatcaccctttccttctccctttctgggttttctaattggtgtttaaagcaaggacttgaaaagctgtgtgttgtaatagcagtgtcgcatatagcctagctgtggtgaagctaaattgccagtctcttcaaagaaagttaatttgttaggttttttgaatcataataaaaataatcatattattgttaaatattttgaaatcatctattggtcctttgctctttctgcatatttttcatcaaagaattgatatgtttctgtttaatggcattttagacctagccttggattaaactgaagcattaattactgtttgatttttttttttttttttttttgagacggggtcttactctgtcatccaggctggagtgcaatggtgcaatctccgctcactacaaactccgcctcctgggctcaagcgattctcctgcttcagcctgtcgagtagctaggattataggcatgcgccaccacacccagctaatttttgtatttttagtagagacggggtttcaccatgttggccaggctggtcttgaactcctgacctcacgtaatccacccacctcggcctcccaaagtgctgggattacaagcgtgagccacggcagccggccactgtttgattttttacttttcctagaagttaattttgacacatggccaaaattaacatgaaataataaaagtggtctgtttcccatttggagtctttttgatgaccgtaaatgaaaagattaaatttttaccagattaatccagaacagaagtcttccttactggtgtgacctgttagtttagaaactttgtcctgaataaatacattgtgtgttgcatcagtatgtatcatagttagtatccaactacacccaccaattcctgtttcgctggtcatttgtatctagtcttggatttttttcaccatagtatccccagctttggttatggtgagttgctttcttcattgaaattcttttgcacctttttcaaaaatcaaatagccatattttttgtgactgtatttctggattctccattatattctcttgatttgtgtgcctgtttcttcatcagtaccacactgtcttgattattaatagctttatagtaaatcttaaaatcaggcagtgtgattcttccaacctcattcttttccaaaattgttttagctagtctggttccttgacccttccatgtaaattgtagcatcagctcatctgtatccacaaaaaaaaaaaaaaaatcctgctgggattttgatttatattgcattaactctataaatgtgtttggagagaattgacctttaccatggtgagtcttctgacctgtgaatacattatgtctatttatttatttgaagctctgttgttagttgtatacacattgaatatcttcttggtgaactgacccttttgtcaaggtctctcgccgggctgggtggctcacacctataatcccagcactttgggaggccaaggcaggaggatcacctgtggtcaggagttcaagaccagcctggccaacatggtgaaactccatctctaccaaaaatacaaaaatgagccaggcgcggtgatggacacctgtaatcccagctactcggaaggctaaggtaggagaatcacttgaacctggaggcagaggttgcagtgagctgagatcgtgccattgcacgccagcatgggcaacaagaatgaaacactatctcaaaaaaaaaaaaaaactgtcttcatcccaggtaaattcctttgctttgaaatatttgtccaggccaggcgcggtggctcacgcctgtaatcccagcactttgggaggccgaggcaggcggatcacagggtcaggagatcgagaccatcctggctaacatggtgaaaccccgtctctactaaaaatacaaaaaaattagccgggcgtggtggtgggtgcctgtagtcccagctactcaggaggctgaggcaggagaatggcatgaacctgggaggcggagcttgcagtgagctgagatcacgccactgcactccagcctgggtgacagagtaagactccgtctcaaaaaatatatatatttgtccaggccggacacggtggttcacacttgtaattccaactttttgggaggctgaggtgggaggattgcttgagcccaggagtccaagatcagcctgggcaacatagtgagacctcatctctgcaaaaaaaaaaaaaattaactgggcctggtggcacacatgtatagtcccagctacttaggaggctgaggtgggaggattgcttgagcccaggaggtttaggctgcagtgagccaaggttgtgccactgtactccagcctgggtgacagggcaagaacctacctcaaaaaaaaaaaaatatttttctgatattaatatagccattccagcttccttttgattgtttgcatggtatgtgtatttccacctttttcttttcttttttttttttcttttttgagatagagtctagctctactgcccaggctggagtgcagtggtacaatcttggctcactgcaacctccgcctcctgggttcaagcaattctcctgcctcagcctcccaagtagctgggattacagatgtccaccaccacgcccagctaatttttgtatttttagtagagatggggtttcaccatgttagccaggctggtcttgaactcctcacctcaggtgatctgcccccctcggcctcttaggtgctgggattacaggcgtgagccaccatgcccagcttcatctttttattttcaatctacccattgaattatatttgaagtgagttttcttgtagacagcatagttgggtcatgtttctttatccactctgccaatatgtcttttaattggtatgtatagatcatttacattcagtgcaattgctgatacatttagaattaggtttaccatttttttttgtcttctgcttttctctctctttttcattctctattttccttttcttgccttcttttgggttattagaacattttttagtacttcattttaatttatctgttgtgatttttactttatgtctttgtatagttttttagtggttgctctagggattaccaaataaatatttagaattagttttttaacactctagttggattgtagagaccttgccacaatatggatcccttttccttcccctctttgtgcaatatctatcatattacgtctatatacattgaaaaatcccatcattatatgtcttttccccatcagacatgtttttaaaaactcaaaaggcaggcatctgcctggagtccagaagatcgagaccagcctgggcaacatggcaaaaccccatttctacaaaaaatacaaaaacttacaggtagcacatacctgtagtcccagctactcaggagccttaagtggaaagatcacccaagcctgggaggtcgacgctacagtgagccaagccttgattgcgccactgcactcaagcgtaggtgacagagtgaggcctggtctcaaaaaaataagaaaaccttcacggaggaacagccttatattaatccaggtttttaccatttctgttgctatgcattcccagtgtttcaagtttccttcttatgtcatttctcttttatcttcataatgaactttcctttagtaattttcttaaagcaggtcttctggctatgaattctgttagtttgccttcatctgagaatgtttttatttcaccttcattcctgaagaatattcttgtatatggaactccaggttgacagtttttatgcctcttccttctggccctccatgatttctgatgagaaatcaggtcacttgaatcattcatcccttaccagtaatgtatcactttctctggctgcttttaagatttttttctttttctttagttttcagcaatttatgatatgtctaggcatggatttatttggatttatcctgtttgcagtttactcagcttcataaatatataggtttttttgccaagcatgggaagtttttagccattatttctataaatgttttttctgcatttcactctttctctctcctggaactccagtgacacaaatgttagaccctttgttgttgttccacaagtcctggagagtttttttttttttcagtaattttttctctgttgttcagactgagtaatttccagtgttctgtcttctagttcactgattctttcctctatcccctccattctgctgttgagcccatccattaagtttttttattgtgattattctgttgtttgagttctaaaattttcattcagccgcacatggtggctcacagctataatcttaacactttgggagaccaaggtggaaggattgcgtgagcccaggagttcaagaccagcctgggcaacatagagaaaccccgtctctactaaaaatacaaaattagctgggtgtggtggtgcatgcctgtaaccccagctactcaggaggctgaggcaggaggatcacttgaacccagaaggcagaggttgtggtgagctgagatcacaccattgtactccagtgtgggcaacaaaagcgaaactccacctcaaaaaaaaaatttttttttcgtttgtaatagcatcaaaaataagatacctaggaataaatttaacaaaagaagcccagatttatatgctgaaaactataaaacgttgaaaagataataaaacctaaataattgggatgacatcccatgttcattggttagaaaatgtaatattggtaagttggcagtaatatccaaagtatttaccaaatcatctttttcaaaatcctatctgcccttttatgcacaaattgacaagcagatgaattctgaaattcccatggaaatgtaaaggatccagaatagccaaaagaatcttgaaaaagaagaacagagttagagaactcacactttccaatttcaaaacttactatacaaagctacagtttttaatacatgtgacacaggtatattgatagctatatagatcagtggaatagaactgcaagtccaaaaataaattcaaacatttatggtcagttgattttcaacaagggtgccaagacaattcagtgggaaaagaatagtcttttcaatcagtggtgctgggacaactggatatctacatgcaaaagaataaatttagacatctacctcatactatatacaaagattactcaaaagttaatcaaagacctaaatgtatcagctaatattataaaactctcagacataaacataggtgagcccagtgccatgacacatgcctgtaatcccagctcctcagggggctgagggggaagctcccttgagtccaggaatttgagaccagcctgggcaacatagcaagactctgtctctaaaaaacaaaaaggagaaataaacatagatgtataaatcttcatagctgtggattgggtaatggattcttagatatgacatctaaagcacaagcaagctaagaaaaaatagttaaacttcatcaggccagccatggaggctcactcctgtaatcccaacacgttgggaggccaagacgagaagattgcttgagctcaggagtttgagaccagcctgggcaacatagctaggagaccttatctctacttacaaaaaaaaaaattagttgggtgtcgtgatgtgtgcctgtaagtcccagctatttgggaggttgaggcttgaggagctggaggattgcttgagatcaggagattgaggctgcagtgagctatgatggcaccagtgcactccagcctgggtgacagagcaagactgtctcaaaaaaaaaattaaaaacttttgtgcttcaaaggacattatcttgaaagtgaaggcaacccacagggacaaagtattcacaagttttatatctgataagggtcttgtatttaagatgtataaagaactcttagaactcagtaataagaagcctgcaaaataaaaaggtctgcaaatattttctcccagtcttttcatcctaacagggtcttttgtagaacaaaagttttttaatttgatcaagtccagtttatccattttttcctttggtttctttgcttaggttgtgctttggttgtgcttaggttgtgtttctgcttaggctgcgtgtgtcttttgtgtctatgaatgtgtagtgctctaacatcatttgttgaaaaggctttccttctgccattgaaatgctttttgcacctttgtcaaaattagttggctatctgataagggagttcagtctaaaatatataaagaactcttaccacttaataataaaaagaaaccaactaataaattgacaaaggacttaataggcatttctccaaagaagatatgtggtggtcaataagcacggcatcattagtcattaaggaaatgacccatttacacccattatgataactatagtaaaaaagacaagaataagtattggtgatgatatggagaaattacaacccatacgtactgctggtaggaacgtaaaatggtgcagccgctttggaaatcggtttggtagctcctcaaaaaggtaaacatagagttaccatatgacccagcaattccactccttgatacatacccaaaagaacgtaaacaaggactcagccagatacttgtacaccagtgtttatagcagtattgtccacaatagccaaaaggtagaaacaacccaggtggccatcaatagataaatgggtaaacaaaatgcggtacatacatacagtggaatattattcagccatgaaaatgagtgaagtactgatatatgttacaatatagatgaaccttgaagacattatgctaagggaaagaagccaaacatgaaatattacatattgtatggttccatttatatgaaatgtcccgagtagacaaatccatcaataaagaaagtagattagtggttggttgccagagattggggaaaggggagaatggggaatgactgcctatgaatatgggcttgttttggggggtgggtgggtggcatttgatgcaaatgttctggaattagattgtaaagatggctgcacatatatacctaaaaactgctgaattgtactgttacttaaaggagtgaatattatagtagattaattgtatctcagttttttaatggtgatgggaagtcacactggagaaacaatctcattgaatactggaaacaaaagtttatttgcaaaatatgaactgtaaaggaaagttgtaaaatgagtttggctcttagggagcttctaggaagtcatctgaggcttttctctttttgtgattgccattgactttggtcacctttagcatttaacgtgtcagagtttgtcttgttttttctcaggtggctatagttttaggatctgtttattcagaacataatagcacattataccattaatagtaactccattttggggctgggcgcagtggctcacacctgtaatcccaacactttgggaggctgagtcaggcggatcacaaggtcaagagatcgagagcatcttggccaacatggtgaaaccctgtctctactaaaaatataaaaaattagccgggtatggttggcatgcacctgtagtcccagctattcgggagtctgaggcaggagactcacttgaacccaggaggcggaggttgcggtgagctgagatcgcaccactgcactccagcctggcgacagagcaagactccatctcaaaaagaaaaaaagaaactcctgtttggaaaggctactaatctaattttggatcctggaaaaataagtgaataaaaataagcaactcatccaacctgtgcttcaacaggatcagtgctaaatctccagaggacagtcctgaccctgtgtcggaaggcggggctgagaggaaaactggctgttgaaggccagagggccaatcacacagtctaggagatgggagcatcattccctctttacaggtgggaagctgaggcccaaaaagataccactaggctgaaactgctggatttttacctttacccacagcttgttctcagcctcccttcagaggacaaaaatgggcttgcaaacagtacttccattataaaatgtagacatcaataaaaacagctggcattggtagactgccttactgtgtccttaaccctaccccccaagctgagctgatgacagccgtgtgtagggtgggacaggccatgtccttattgtacagatgaaggaacagagctctgtgaggaatcctgagggcagaggccacacagctagtgtgtctgagccaaggccagccacctgtcctgctctcctccctgctcccctgccatcttggtagggatgctgagtccaacagagcacagttatccattctcctcctgtgaaggtcctgtctgtcatacacacaaggccctgaaagctacctcagcaaggatgtttaaaaaccaacatggcacggttcactgggcaccaagagccacatgtcctgcctggatcatgttacataatctaagaagactgggttacgtgttataggttaagaaactagtaacagcaaagccatcaacagtccaggctagaaatggtgatggcctgaaccaggatccttgggaatggacagggaagcaagtagggagaaaggagttcaaccactgggcaggagaaagcaatggcacaacagcacatcagtgcaacagacctgggtcccagccaggcctggccactctccaattaaatggcctcaagcaacattattttcctgagcttctgtttcctcatcggtaaaatgggtcagtgtggtgacacatggtatccacgggccctggtgaatgcccaggaaagtgttggaacccagcccctgggtacgatggcaaaggcctctctccaagccatggagactagtcattggctgagagcagtcctggtcccatctgcacatgttcatgagttaactgagtcttcagtaactttttatatgacagagacactgacagaaggacagtgccaaagtgggaggccccaggaactataaatagcatgttactgcaagctgtgcataaaaacaggagaaaagattgccagggcttgagcggtccctttcagtgagtgcttgggagccaggctgtgctgctgacaaggtggagaacccagagagcctcagctctttcggcacaccaggaaagggacagcaggctaagctggcagatgtgagagtaaccctccctcggtcccacacttctgatgcactgaagtaaaggcagctgcctcttgctttctgtcttctcccatctgcccacctccttgaagatatgggacaggaagagcaggagacattcatctattttggcctgtttcttttcagtcatttattcattcatttcttttttttttaagataagagtctcatgagtcccttcaaacggttgagcctttaggagcctgcactctactttgtacctgggagggtacttaacagacacttggcttcatttgtgcatttgtctttcagctctgtgcagtgtgcctagaagacttcaagcctcgagatgagttggggatttgcccatgtaagcacgccttccacagaaagtaagtattggtatggaattacttaatgggacccgagtttgaggcacatcaaccaacttcttttgggttttagggcagtgccagacaagcttgatggcttcatgattggtctgtaatgcagaaagctgacagcaccctacaggtgggatgtgtgtgtgtgtgcgtgacattaggagacagcagagtggtggaacgtgaccaccacgtcaggactatgggcagagagccaaaatgagcctacacttggagcccaagcaataaacagctatttagctggaactttccactgagagcctcatctcctaaaaacttatttaaatcaaaaccatagttatttaaaatcaaaataaagtctggatataaatggtagtgtggggcactctcctcccacttcctgcagacatattaatattcttcctcttataattttttgttttgtatttctgttagaaaaatttattttcctacttctcacatccctgctcagtgtattttgttcttgtaagaagtcatgggtaactgagagtatcacatactatctgtggcttcacacgtggaagatgggaggctctggaaggaagaggggattgctgaccccttggcctctccccactccttctctctgtctcttccctctctccagggggtgacatccgttcaccacctaggaggggagctccttggaccatacagcagacgttgtctgggtgacagatatggagatgttcagcagaacagccgtgccatgagcataggactgacatcttccccctgtggtgtctccttctgcaggtgccttattaagtggctggaggttcgtaaagtgtgtcccctgtgcaacatgccagttctacagctggcccagttgcacagtaagcaggaccgtggaccccctcaggggccccttcctggggcagagaacattgtatagcttaccgcaaggatcagactgttgctggacacgacgtctgtgtggagccaggaggaacacatgtggtgtctgtatggctgctctctacctaggacaccagctgccacttcttttgcctcatgaagaactcttgggccagccaaactgggaacctaggtgtctgggtcttgtgacaaccaaagcactttgacactaccccctgccgagagaagaggagtggatgagcctgcgggtttgcctcaagaaacttcatgagggtctcttactaactccattacactctctctcctggagcctcatctccatgtcaagcaggagggtaaagaagggaactaagagcaggtctttcaagccacacccccacctgcggatggatgggtttctctgtaggccatgcaggcctttgtcgcagcaaaccttcccagcagcccttgagccaagtaaaaccagcacaaccagccaccagtggttggtgaggcagtgcccacaaggctcatgttgtatgcctttgataaggccatcttggctttgagtagcagtgttcctcgtcacccatttccccctcaggattacaacacctgctatcaaatcatctaagctgaaaacatgagatgcgcttggaaaggcctagtcagaagccatttcctcttatcatttccctctcctatgcaccagtaaggcccgtccagagccccagcagggagtgggccctgagtccacactgtccctgagtgatccaggaggctgcccacatccccacatgtgcactgtggttccagtgtagctgctgtgagcccactgccactgcctcagaagggagccactgtgaacctctcgagtggctccaaagagcagtggctttttgagaatggcccatacttctggcccggctggatgaagggaatgccgaccctttggcctctccccctccttccatctcttctctctcttgccctatctctctttctacttcagaaaaaaaaaaaaaaaaaaaaaaaagcctgtcattcactttttaacactttatcccaaataagatccctgtgtaattctgaagctggtgatccacttggaattgtagatagtttcaggaagctcctgcagggctgtccaccgttggtgtgtgcctcagtatttggacttccgaaactgaaagtgaaagtgtctttataggagagaaacgcatgctgctctttggctctttctgtccaacttttctagaaatgactcaaagtccattaagatttgtgaatattgtataaattagctatggaaagtagcaggtcagatggaaaattcttttccacagccctgctctccgcctccctccatcttaggagcgcctgcctcaattcctcgtcaactgctttgctccactccatcccacaggtgtgagtgggggaagtttttcattaggaatacagtctgcgtgacatggagaatggatggagggagctttgctactctgctcttggcatgactccaggatttttttctggaatccaacctctgtcctcttaggagaaggaacctgtccttggttcagatggctgggcatgaggaggaaaatttccattagtgtagaacagtgctggacagaatccggtttggaaaattacaaatccagttggtcaaaataggccatttcctatgtgtgacctattcgtggtatgccaactggactgcttcctaaacaggacgaggaaagtgaggaatatttttatatgaaagccttagcctgtctggcacccatgaaaaaaactatttatgcactcctactttcaccgtctttttgcattctctatttgtagcacaacagagttgaatgccacaaaacaccccgtttatagtgagctgttttcagtgaccaatatcagaaggaggcttgcttctggactagcctcactaattgccagcagccaccattttccatggaatggccttgggacagatgtcacctctgttatggggctctaataggaaagagaatgttttttcccttcctatgatcaatactgcaaattattgctgctcacagcttttataggattctcccaactgaaagttgcaggctttttctgtccctgtgcatcagtactaacaaaagacagcctcaccaagtctgtatatttgaacagaggcaagttaattcatccccccgtgtcagagccacaggcatgttgagggggttgatacgtagcactggaccagggcgcaaagcccagatagttccagccatgagaggagagcacaagaatgctctgcactctgcactcagcaccaccttgggtctgctttgcccagatgagggaccactaacaaccttctcagcacatgtgaatgtggactggttttaaaatgcattcattctgctaggattgggctggaagctggaacagtgagagtactttttctgctcctagtcatctccctttctcagcgtgacatcctcctgcagcaagcctagtatcactagcagtagttcctgcgactcttagcaacacaacccgaatatttgctccctgcatctgggtcctccaccaggatgggcctgcgcatctgcattgctgtacagacaaacaggccttttaatttacatcctcctttaattctcattaaaatcgcagggtttttgtttgaaagacagtcctttttttatttattttgaaaaaggaatgagttagggacccctttataactctcttggctcagactcgaaccccatggtaaagtcaccctttccgcatctatcttcaggagttgctgggacttgttactgtgtagctgcgtggggattctggtctgctcttggaccactggctggtatcctttgtgtgtttcttaagcagctcaaagatagaatgttgctggtctgctatgggttagtggagcataactcagccccaactggactccacgggtggctgaaccattagtagttgctaggggtacaactgaattcaactgccttcagaaacagggaacaaaaccagcctgacttgattcctggttgggtcagtatcagacactaggaagttgacatctgctgcttttctttgccacgtgtgatttggttaggcctgtccctggcagataaggtccttgaagcctatgcttgcctagccagggaaggcaggacagaaatggccaaataggggcaggtggcccctgggaaggtctgagctgagggatacaggggacctcccaccattgccggataccctgttcttgacaagaagatccttttccccagtgccaagccccttggatccatcagagaaatagcctcgggccttgtcctttttcacaaccccacttcaaaatcatgtcatctccctggcctgatcccgctctaagctactttgaacaactaggaattatttttctcagaggctttttgggcattatgaaatacatcctgatacatccagggcagtatacccagagctccaggcagagagtgatggaatcacctcttgtcactcactagccttaggcccttctgcaggttagcctctcagtctcttccttagcttccttagctaccacccagggattgtagtaacgtccctggcacctcttgtgggggttagctggtgcccagagcctggtaggcagcaggcctggtgtcatgggggctgctgataccacataacatcatctgggttacatgggctcctctgccatcatgattgataggaacagaacctcagccaaaaagcttcctgagctgtaggggctttccctgaggcccaggttcacctggcccctttcttccttggtcatctctgcctttgcccacagtgaactctgacttggttgttcagtgctgaatatttctttcttaatgttttgaataggtaatccattcatgtggttcacaaatcataaagtagttaaaagcctttcttgagttcctgatgcctagcaagctccgctcctcactccatgaatacctactattggtttgttccttgggtatccttccagagatcatttatgcatgtacacacatgtgtatgtgtgtctatataatttttctccttttctactcatgtgataccagacaagtgtattcaaggaacgctcctactaatgtgggaagagccatcccagaaatcagaatacaaaatgtgaacccagaattgggggatgtttttgcaatcacactcctgttgagtaagacatattttcattttattgcaacatactgaaattttagttttctgtacaaatcagaatctgcagtccctcccttaccccaaatgcccagctaatccaagagcacaaccagatttttctgattgactttctatctgcgacaggatgctcaagatcaggctctgtagctgacagcagtggcacaggcctctcccagctctgagcagcctctgcaggtgcctggacagctgctggcccctcccctaccttggccagttccaagtgaggaccagtggtgatgtgtggctgcaactgttgtggtcacttaggcaagctcttgtgtctttgatgcaggagtttgagcagcagcaactgaaggcttctattttgtggggcagacatcttagctactgagcaagtgcacagtgagtctcatgtggatatgcctgaatgtccagcgtcagttcatggagctactccctttccctcccaacttttcgttgttgttgagacagggtcttgttacccagactggagtgcagtggcaccattgtagctcactgcagcctcaacttcctggactcaagtgatcctcccgcctcagtctgtagctgcgtctacaggtgcacaccagcacacctggctaattttcgtaattatttttttgtagagacaggtctcaactcactatgttgcccaggctggcctcctcactctgtgcacacactttgaaaagaaaatgcttctggtcgggcgcgatggctcacgcctgtaatcccaacatcccagcactttgggaggccgaggcaggcggatcaccttaggtcaagagttcaagaccagcctgaccaatatggtgaaaccccctctactaaaaatacaaaaatttgccgggtgtggtgacgcatgcctgtaatcccagccactcaggaggctgggacaggagaattgattgaacccgggagacagaagttgcagtgagccaagatccccactgcactccagcctgggcaacagagcgagactccgtctcaaaaaaacacacaagaaaagaaaatgcttcctacagaattttccctttatgccttgttttccatttgacaacagaaattaccccaacaattttttttttttttttttttttttttttttttgagacggagtctcgctctgtcacccaggctggaatgcagtggcacgatcttggcccactgcaagctccgcctcccaggttcacgccattctcccgcctcgggagctgggacaacaggtgcccgccaccacgctcggctaattttttgtatttttagtacagacggagtttcaccgtgttagccaggatggtctcgatctcctgacctcgtgatgcacctgccttgacctcccaaagtgctgggattacaggcgtgagccactgcgcccggccaataatttttttagtttaagttcatttttgtccccgctgatgaaagttagagctgcttcctccaggcagccctgggagtaggggcacagacttgtgcctcgcttcccagcagctgcccagtgcctctgtccacacccacctccctggtgtacttgccccctacagcagcagcccagatcctcccctggattaaaattgcaactggtgccctaacccaaaacttgagaaaaaattctctatcacatccactcttctggcatttgtagaatctctggccctgggtgtgtcttttcctgtagctgttacagatttcttaagcagatttcttaagcagatggacatgtccagattcatgcctaaatatccagttgataactggaaaatgctggttcacggttctttagtaaagattaataagggatccccatgtgctggggagtgtgcttccatttgagtggggatatcagaagaaaaagaggggcttgtgtagtaaaccttactttgccaattcagctgtagagcccaaattgttacaagatgcaaagatgtactccactttttgaccaagcatcagcacctttggcttaccatccagtccttacttctgtgactgtaagggccccaccagtgtcagcagacttgtttgtgctttgggggaactctcttctcagctccctttgccagtcccaagcctggtggatctgcatctcacgcccactgcacaccgttcctctccatctgcccttccctcccaggcccccggtcgggggagcaggtgtggcaagtgttaggaactcccttctggtgacagctggtcttcctagagtgttgctggtaactatcgcctcttggtcttctgacatcattgccaggaacggggcactttttcgtcttgtagtttggccctcgggtttcctcactaggtattgtgtaactccctcaaaaaaaggtttatgaaatgctgaacctcaggtttcatagacgtctttgtacactaaaaattctgcagcagaatatttttaaacattcgcagttttttgtaagctatatttttgtatatttaattgctattttaaaattttaatgcattttgctaatcactcctcaaaaataaaacatgcatgtaattgactcaaacgtgtaaataaaagcaaattttgaaaaatagtgttgtgcatatgcctttgaacagagggaacatccatgtgccacttacgcaagcaccttcagcaagacttggaaactcaaggtgagtaattctatcagagctggtaactagtactgagtgattgtgatggaagcccctgcccttcctgtggcatagtgtgcaagcgggggtggggtcagtggtgaagagtgtgtcaggccaccacagccagagaacagagaatcctggaatgcagagtacagtggagtctgaagccccctggcctccctgagctctgcaaacagctggatacagataagcagtcttccacgtgaacgccagcaccagggtgacctgaaatagcggatttttttttttttttttttttgagacagtcttgctgtcacccaggctggagtgcagtgcagcaatctcggctcactgcagcaacctctgcctcccaggttcaagcaactgtctgcctcagcctctcgagtacctgggattacaggcacgcaccaccattcccggctaattatttttgtattttcagtagagacggggtttcaccatgttgtccaggctggtcttgaactcctgacctcaggtgatccacccgccttggccttccaaagtgctgggattacaggcatgagccattgcacctggccaaagtagtggaactgagcctgtttcctccacaggccacaccaccctgcaaagagttgcccccaccccaagcccctagctatatcccaggcctggaaataactagtgtcaggagaaaaaacgtccaaagccttcctgtgtggccgttgctgctctcctcaccacccctcactaggaccgagtggcttcccagcttccatcaaggccagccacgatcttgcaaccaattgtgggcaacctcaattcagatgcctagagagctcctcttctcagtcccctgagccacaggcccctggccagcctctccctgagcagtcgttttctttgcagcttcctccgtcactgctcaactctcggttatttttctcaccctaccttagaactcatgaaatcccccttgctttgcccacctacatgcatatcattctcagctctgtatctccaacccaaatacccagtgcttatttggagtctcaaaatcacgtagtccacaaatgagcccaggtgccctcttgtatctctcctccctcccctgtatccagtcaccacttcccaacacagccctctaagcatctctccattctggccatccacttctcccctctccattctggccacccacctcccatcttagttcaggccttcctttctcacctggaccacggtcacagcccccttcatggccactagtggagggcagactgaaagggacagctgctaagacagggaagtggcaatggtaacagcagagtttatgggcacctcacaacctgaaggtggtgagacggcagtaagctgggatgaggatgtgggcactgctgcacagagatcaacaaatgcagagagaaggcagtgtctcggggctggagctcagaggtaaggggtggttgaagtgttccctggaaatcagtcaaggtgatgctaatgactgcttggggagacccaggactgaggctgaggacagccacagctaactgtcagcagagaatgaaccagaacattagtagcctgggtggcaggacaggcaagagggctctgctgagtgagaactgagatgaggctgtgaaatgaatgccagattcggtggcatgggattcactggtggcctatcaagaaccctgctgtgagccgggcgcaggggctcacacctgtattcccagcactttgggaggccaaggcaggcggatcacctggggtctggagttcgagaccagcctggccatcatggtgaaaccccatctctactaaaaatataaaaattagccagccatggtggcacatgcctgtagtctcagctacgcaggaggctaaggcaggagaattgcttgagcctggaaggcagaggttgcagtgagctgagatcgccccactgcactccacctgggtgacacagcgagactgtctcaaaaaccctgctgtggagtgacagggtttactgagcacaaggtggaacatgagggaatggactagtttctctagagtagggggagggcccacggaggaggaagctcaaagcgaggcagaaggggacatcaacagcgtcttcccaactcaggcaccagagacagacagtcccgggtttgagtccagctctactcttttccagctgagtgaccctgggcagccttactcatccgttcagtttccttttctgttaaattgtgggaacagcaagggctgcatggtgacccacgtcgagcagtggacaacctcctgaacgcagcacagcagaggcagcaggaccacaaaacaggggcctcagaggggcaggccctggcctcggtctccatgggaagtgagcaagttcacaggagttggcccagggagcagcaccctgtggtacaagcaggaggatggtggtgccatctttggtgcctgggtactggaggagggtgaggccaccaacagcgctgctggcagcagaggagggcagaggaactcaggatcagggcgtcagaggtagtataggccaggagcctgcaaacagcagcagcagggaagagggtcaccaatcactctccaggggacaaaattaccctccacgcagcagccatcctgctctgcacccacacaaggtcccaatgcagcagcacccatatttcctaagtgccaaggcccatgtgcagaggtggccacgcctagtggaacagcccacagcccacatatcagttccccttgccccagctggaacacgggtgtctctgctgcctccatgcggctggcaccctgcccatccctccctgaccacagccttaaacggaggggagcagggaggctgcagagccttggggttttccctcctggtccaaggctgctttgtacaggcccatccttgccttcaacagcaatatgggcaccacttaagacctcagatataaaaggtgcattctctccttgggaaaggcttttgaaattattctgcaaagcagaaagaaaagcttcagcccctaccaagagcacctgcagcctggcactctcctcaggcagtcttctgagactcacctcccaagtgccacagtgccctgaaggaccccccactccccatgagttctttgacagacacttcagttcttccttttctacttagcctgaaagaaaaaccagattctccctgatcccctgagggggtgtcaattctagtggccctgctgactcatgttagtcctccagattgtgctgcttctgccagtgtacccacttgcatcagaacagtccgcccactacccaaggaaattctgccaagaaaagaagccctgtctctccagacattcattcccaggatttagtgtaaagtaacgtggaactgcccttccaaaaactgcttgttaagtttcaggtacacaattaacctgcccaattaattttgcagaaccttgaaataaaacatgttttacagtaagttcacacacaggcttaatgcaaaccagagtaatgcacagatgattgccaagaccatattgacaaattgtgattagattataacgcatagtagcctgccttacattcagcaagttcaaacaggacacaaaaccagtcaactgaacacagagcagctctcttcagaagcacttccaatgagtgatgcagagatttcaaaaatacaaagcaggcaacttatatacagcaaatcctcacactgcctggacatgtgccacttttttgttgtttttaatatatttttccttcctggttgctaatttagactgaattcttaaggatttatcttgatgacttagaaaaatacacctgtcctttctcactttgtttcaggtagtacagtcatgaaattgagtaagtctcttaaaaaaatgaaagtccacagatcccattgtggaaggtttcaggaacccctccccaggtaatgatcacgggatcttcaacagctcaaggagtgctccaacagctccaaaataaccctgaaagaaaatacaccaaaaataagtgcaattttccttagacttattcaaatcaccttacacatgatgactagtgttaaagccaaccactgcccacacacagcatacccatttcctgagcaccccagaagggccaaggccagcctgggagcagagacgccctaaggagtccctgtctggggagggggctggatgtcctagactatccaagcacttcagaccactgtgataagaggaaaaccaaacccgcagtgagggcgacaggagctatgaggccagcagcagctcagttacctctggtaagagacagaacctgactgtttctggggaatgaggtgagaagcagcagaggcctggagcatttccagacaactaaggaatgaaggcgaggtcggatgcaaagtgcaatgaaacaggtgaagttgtgaggtgggtcacagagggtgagagcccgactgagctgggagagggagggagagtaagagataagatggattcaagattcacccctaacagaggacaggacagcaggagggggcagcatccccgagaaaggggacacaggagtaagaggtgtggagagcaaggccggtgggtgagttccctacaggacatgggaagctgaggtgcccacagcagccaagcagctgtgcccgggtggtcaccagacacctggatcactggcccagaagcaggcggcacaggaatgaaaaccaccacccaaaggtaacgtgaagagaggtacagaacaaagagcaaagcctgaggaagcacggaggctcccgagggagggcagccctcagccctcctgagacacagaagcagcagctgagagacgacaagcactgtactgtctccagaagcagtcaggtcacatgcaaccaagaactcaaaaccaaaacacaggaatagcacattagagaaaacggggcaaaccccataatgacagaaaagagaacactagcaagaatcagaggcaaatcctaaaacgatgcagaatccatcagggtctccaacctgtaaggtaagatatcagactactttttaaaagaaataactaaaaaaggaatgagaagatcctgaaagacttgtgtatggattttttaaaagtctctgaaacataaataactaccactctatctttcacgaaaagcttcttcaagaaacctgatcaaacgagaggccaaaggctttcttgtcacactctagttggcaatttaaaagaaaggcatattggctgggcgcagtggctcacaggtaacccagcacttcgggaggccaaggcaggtggatcacttgaggtctggagctcaagaccagcctggccaatatggcaaaccccgtgtctctactaaaaatacaaaaattagccaggtgcggtggcacgtgcctgtagtcccatctactcaggaggcttagacaagagaatcacttgaacccaggaggcagaagttaaagtgagccgagactgcgccactgcactccagcctggctgacagagtaagaccccatctcaaaaaacaaaaaaaagaaaggcatattgaccatctttggttttggtgtgtataaataaaataaaggcagccacaccaatctgtgatgtgaggcggccagcagctacaggacaaggcacagctgaaatacagaggcaaggctgtttgtcttaatagttcactatacagtttgttttaggcagctttctgtaccttttattttataataaaaatatagaagatacagttaaccattatatatatatatggggggggtccactgaagactaggatgctactatcaagacagaaacaggtggttataaactacaacgtgctaagatgagaataaaggatcaaagaggaaacgcttgagagaatctatacgaagctttcacaacaaaagttaaagtgacttcaatgtgagggcaagaaaatatttcaaggctcagagaggctaaaataatcaaagttctgaactgaacaatgagaacacttggacacaggaaggggaacatcccacaccagggcctgccatggggtggggggaggggggagggatagcattaggagatatacttaatgtaaatgacgagttaatgggtgcagcacaccaacatggcacatgtatacgtatgtaacaaacctgcgcgttgtgcacatgtatcctagaacttaaataaaaaaataaaataaaataatcatcaaagttccacaagggcagagatgcacacaagagtcaaaggcctgaatgcaaatggaaaacacagggacaaatggaccagcaaagctaagcagtgggaaaaacaaagtcagcgagcaataaggacaaaatgcaaccaagaatttcacgaaggcttataactattatgatgatatcggtttggtgttttgttttttgttttgagatggagtttcgctcttgttgcccaggctggagtgcagtggtgcgatctcggctcaccgcaacctctgcctcccgggttcaagagattttcccacctcagcctcccaagtagctgggattacaggtatgtgccaccacgtccagctaatttttgtattttttgtagagacagggcttctccatgttggtcaggctggtcttgaactcctgacctcatgatccgcccacctcggcctcccaaagtgctgggattacaggcgtgagccgctgcacctggcctgtttggtgtttttgtttgttttgttgttgttgtttgtttttgtttttgagacagagtctcgttctgttgcccaggctgtagtacagtggtgcgatctcagctcactgcaacctccgcctcccagattcaagagattctcctgtctcagcctcccgagtagctggggattataggcgcccgccattgcgcccagctaatttttgtatttttagtagagacagggttttgccacattgaccatggttggccaggctggtctcctgaccttaggtgatctgcccatctcagcctcccaaagtgctgggattacagacgtgagccaccgcacccagcctattttttttttaaggttaacttaaaaaactaatctccatgttctacctaggaaaaggttaaacaagaggcagaaataaagcagaaaaagatctaacattcgagtttaaaaaattctaatataaagcaaaataaaataagtcagatcacaaaaaaagatgtatacagaaacatgaactgtaagaaacttaatggcaattcggtgctggtttacaaatacagtaatgttagaattttaaaactaagttagatgacttcaattttaagctttttgatatggggatttgtgtactttggacttcaactatgaactaaagcaatttaaaaagaaaaacttaaagtaactttaaaggaaaaagtaatctctagcacttcaaatctgtgctattatctggactttgatttcctttaattcatatagactgttaaactaaatatgcaatacaattctgaaaaatgttcataataacagtatctaaaatccaagaacagttgaaagaatagttcaactgccccacaaccaagaagggaagaaagaacccctacacgcctttccatacctctgcttctttttccccaaataggaaaaataagagtgctttccaagacaggctatgaggttgagcaatttgattcttttccatttcatcatttccagcctgtctacaattgtacttaagttcttatgatagtatggttctagtctgagaggtttactcatctattcatttttacaacatgcatcttaaataactggcacaagaattacaacaatatataaaaactggcactgaaaaaaatgaaaaaaccagaacccagagtaatgacacagtcagtgcaatagaaaaaatatagaggatagttcagacaaaaatatggcatcagaaatataggggaatgttcaagggtttttctctaaaattccttaagcttacaattaaattaacccaaaatttaccttgcattagtatcagggaagaaacagctttcaaatgttacgaaattaaactaccaaaaaagttcaggcacagtggttcacacctgtaatcctggaactttgggaggctgaggctggcagatcacttaaggtcaggagtttgagaccagaccagcttggccaacatggtgaaaccccatttctactgaaagtacaaaaattagcagggtgtgggggcgcacacttgtaatcccagctacttaagagactgaggtgggaggactgcttgaacccaggaggcggaggctgcagtgagccccaagactgtgccacgcactccaacctaggtgacagagcgagactccgtctcaaaaaaacaaaaaacaaaagaaacactgcagcccatttcacctccaccctctacctcaagttccatgacagtgtgacccacaagccctctgtgtacataatataccacaacgaacaagtcagcttacctcgtgttccgaaaaaagtgctttcaactgccccttggaccaataatccaaagcatatgccaaaagccgcatggcgatcgtattaattctcaagaaatttccaacaaataccacctggttaatgttctgagcacaccaaaaaaaggcaattagttttcatcttaatttctattttctcataaaagctaccccaaatacagcaccatgtgcatagctcttagcaacaatttgactgctgatcaaatttagtccagttggtccagggctacttaaacttgatccccagacaactctggacccactgcaaagcatgctagataatgtcacaggagaagaaaacagattaggaaaaacatttgtattaaatctgaccaacaataactagttttgaatacaatgttttatacagataagttaaaataaacaaaaaaaaacagtatgactccaatccaaaaggacagtgacacaaacaggcaaagtatacaagcaatataacaggcagcgaaaaattcaaaccactagtcatcaaacaaaagtaaaattttagacctattaacctcgcaaaaaaaagcaactgaaattccaccaccaccatcagtagttgtagtaaaattaatccactcattcaccgctaaagatgatctaaattggtgcagcccttgtgcaaagcatcatgacgataaatgtcaaaattcatgagcatgatcatttctgtagaccagaaatctcactcctaagccccatatcaagaataaaattcaaccaaagaataacttcatgcttaaaaatgcttactgccgagttatgagcaagcaaccaaatgccaagctctgttatttgatataaaagaacttgatcaaataaatatacaaccatgaaatgtatatttaagtataaaatacaaattgtggtatgcacaccaactaaaatttctgaaaatacgtaagcacaggaaagggaacatacaataaagaaaaaagaagttatgatattccaacaaatgtttaattacttgatgctgatacagtatttttttaatttaaaatgagacaaatcctttgtgtcttttgaggtttccttttaagctacatgcctattattatctaaagaataacttcttaaaaataaaaataaaagaataatttaacaactatacacacagggacaagccataagctgcaccaactggatc

SEQ ID NO: 58552 - DNA, 516 bp, Homo Sapiens
  misc_feature (466)..(466): n is a, c, g, or t
ctgtatcacttgaggtattattcatacaacagaacaccatatagcattaaaaatgaactccaggacccaacaaggatggattatacaatgctgagtgacaaaaacgacacaaaagcacatacacaggattccatttatctaacactcaaaagcaaacacaactatgtcgtataaggctgcatacaagaatggtaaaattcaaacgaaagcagggaaatgactgacagaagacgatgacctggaatgtgccccaatctcagctgcacatcaaatgtacctgggatgaggtgggtggagctttgaatctaccactatccaggccacacacctagaagctctggtttcattgtttcattgatttcattgttttgattgatgctgaccttaggcagcagagttttcaatgctctccaggtgtttctaaagtgcagacaagtttaggaccgtgcttgagggtgaagggcangactgtgatggggaggggcaaatatggggcccttggggtgcaggcaatgg

SEQ ID NO: 58553 - DNA, 833 bp, Homo Sapiens
  misc_feature (316)..(316): n is a, c, g, or t
  misc_feature (335)..(335): n is a, c, g, or t
  misc_feature (349)..(349): n is a, c, g, or t
  misc_feature (362)..(362): n is a, c, g, or t
  misc_feature (364)..(364): n is a, c, g, or t
  misc_feature (367)..(367): n is a, c, g, or t
  misc_feature (372)..(372): n is a, c, g, or t
  misc_feature (378)..(378): n is a, c, g, or t
  misc_feature (383)..(384): n is a, c, g, or t
  misc_feature (386)..(386): n is a, c, g, or t
  misc_feature (431)..(431): n is a, c, g, or t
  misc_feature (458)..(458): n is a, c, g, or t
  misc_feature (473)..(474): n is a, c, g, or t
  misc_feature (477)..(477): n is a, c, g, or t
  misc_feature (480)..(480): n is a, c, g, or t
  misc_feature (507)..(507): n is a, c, g, or t
attataatggtaactgtaaaatgtactatttttaatgggtgtgcatgtcaagmttttctttagaaatacactggtctggtctaatttatttaagcaggagcactttaaagtatcccaccctaccccattccacccccagtggacagaaaggaaattgactgacttgagrggatgcagacatctgggttattccaacagaccagtggttaggaggagggggtgggtagcattatggcctcgggcaggcccccccaccctgagcctctgaaagctgactttatctgtaagagggaggtcaggctcgccttctcaatancgtgtatttggataaratnagtttcttctggantacacttaggcanancanggctngcttanggctnnancctcagcgtttcacaacttctcaccttctcttccatgtcagtcanaatggcatccaactttgccaccacctnccgtgcattgtccannctnaancacattgggggcttaaacttcaagatnttcctcccagggccatcagtgctcagcaaaacgtattctccttcagccttgataccaagtaggcagcctcttcagttgctggtgtccttgtggcctcatctttgatcagatccacaccaatgaagagcccaacacccckgacatccccgacgatgggatgtttgattttttgctgcccgaggagctgcatcaggaagctgcctacactggtggcatgatcctggagctgctccttctccaagacattcaggacggccatccccacagcgcaggacactgggctgcccccaaacgtgtttaagtactcaacgccggtggsttcaaat

SEQ ID NO: 58554 - DNA, 579 bp, Homo Sapiens
tttttaactttttttcacaacaaaatttattagaagaatagtggttttgaaaactctagcatccagtgagaactaccatacacaacattacagctgggaatgtttctccaaaatgtcatggtcaaataatacaatggaaccattaaatcttacacatgcacgaaagaacaagcgcttttgacatacaatgcaaaaaaaaaaaaaaggggggggaccacatggattaaaattttaaggtctcatcacatacattaagacacagttttagtccagtcaaaaatcagaactgcattaaaaaatttaatgtagtgcaatcaaaccaaaaaacttaatttgtgatcataagtgctctactacataaacattgatcatagcaaggaacaaaaagttcaaatcacacagtacaaaaaaatctgtaaataaatataaactacagtacaagagaaatattaaattatacaattccatcaaactgtaaacagtatattgaaatgaggtccataagagtaaagggggttcctgttttgttgtatgacacttgaacttctagaaatctgaaagataccattttccatatct

SEQ ID NO: 58555 - DNA, 405 bp, Homo Sapiens
gtcttctaagtcttcatgtctacagtgttattttttgctattattttttgtttcttcgacagtgacataaactgaggtaaacatctgtgaccaacacctctcctaaggggcaaagggtcccagcccgaccagcagaggaggtggcagcaccagggccccaacctggtgttccggttctgctctggggtcaggctggaggctggccctctgggtgcctctgggaatgagggggctgggctacataactatggtcccctcccaactctaacatactagatactacaacggctggggaaactcccgaacaggatcttaacagagagagggagagagagaaagagaggagagagagagagagagagagagagagagagagagagagagagagagggagagagagagcgc

SEQ ID NO: 58556 - DNA, 546 bp, Homo Sapiens
tttttgtaatcgactttttattaagattataaatttaaacaatctgaacagttttacccggtgatatacaattcagtatgcacaaaaatacagggtaatgagggaaaagggccgagaaaggaaggattggcaactcgttttggagtccacacggtgctgatggcagagaaccagaggggctgcagacgaaccccacctttttacaacaaaaggcttttaaattaaacaaatctatcgagctgaagacacaggacggggttctcacaagctcgaacaatgctggtttcatgaaatgcaaccgaaggctgaaccaaggcagtgcaacttagaagcacacacacaaacaccacagctgaccaggaacttagtgcaaagtctccaacgcagtcggcggtcccggcccctccctcccccggggccgccggggatccaggtgaaggaattgacttccttttttgtttagtgaggaccgcagtgctaggcatgatgggaaatgtagtccgccgtgcccgccccccaccccttacccaaacagtgtccgagagt

SEQ ID NO: 58557 - DNA, 548 bp, Homo Sapiens
ttttttcaagggaaaaggtgtttatttagaacaatgaaaacaatgagacattaacttccagcttaaataaagttgattgtgtgcataaaaatggtgaaaatattggactttcttggcaaaagaagaaaggggaagactttatattttctgacataatattcatcatttgtctttggtttgtgtattatgtgtatgattttgaaaaaaatgcattaaaaaatataactttctggtgtttgctttgatattatccttgcaaacagaaaagttggcacatgtttctgtataaaactggtcaaagttggcctaggaatgatcttacattgtactttcactttacatcatactgtaagagtttaataatagctaaggcatcagcattgatgtggacttattatacctattcaagaggtggtgtgaggtttaggagagttatgtgccctttatcataaaacaaatctatggagcatttatataaaaacccagtatttctggtttcaaattcagtactgtgccgtctgcttgatagatttgttcgcaggttagag

SEQ ID NO: 58558 - DNA, 601 bp, Homo Sapiens
  misc_feature (406)..(406): n is a, c, g, or t
  misc_feature (421)..(421): n is a, c, g, or t
  misc_feature (521)..(521): n is a, c, g, or t
  misc_feature (576)..(576): n is a, c, g, or t
  misc_feature (586)..(586): n is a, c, g, or t
aaaggaaaaaattcaaagtttattcaacattaagaataacagacagataaaggtttggacttaacagcataaataccaccaatatcatggtgtacaattaaactaacctcatgtcaacttgtacctgtttaacagatgcgatctttgtggtgttgccaaaaggataatggattattgttatgtttggtaaggtgctcaaaattaaagactttatgtcgacttattcacacacatacacacacacacacatgcacgcacacacacacacacacactcttacacttagcctcctgcaaaatgtattgactttagttgctatatccgattcggataaggctttgctccattttttaaatggacatttattaattggcagaaaaaaccgtggaggagaccttggccttgncagtggggggtaccnagggagcagaagggtgatcgcccacctggaggggcagatcacttagtccccagacacctgcaggggtgctgagaccccagtgctaaatccagatctcccnattgcccatcacacatagggcaagcaggccctggtcccatgccttggggatcgcnctaattgacnggggataaagattga

SEQ ID NO: 58559 - DNA, 602 bp, Homo Sapiens
gttgaaaagagctttttattactaaaaaacccacaaggtgctgtctcactcatttccagttaatcatttctaaagagaaaatttacattttgtttttgttttaatgttggtcataaatttatacagttgttttttgatagaggtaagaattagactcgatgcatttttgttagaattgctgtttaaatgttaacatcagaatgcaaattaaatataaattgctttaacctttgttacaggtatactggactttctgaaaggaaaaccaggtctcattaatgctagttattactttatcacagcaccagatttccattttatttatggttcctctctgggacaccactgtcggtttaataaaacaataaataattcattgcacagatccgaagacctcaggaaccagatcacaagggaaaccgattagcagcagaatttgttcatgtttggtggcagactggtggccaactggagggaggggagttttactgtgggtttttgaagagggtctgtcacaagaccagagatgcctcttgaagagatttttaggttgtaggtttgcttactctaaagaacatcttgcccagaagtctgatttgaga

SEQ ID NO: 58560 - DNA, 575 bp, Homo Sapiens
gagagcttaggattttatttttcgtttacacagggaatccaagaaaggagacagacaaagtgagtctcaaggatgagagcagagaaaagctcgagataagagctgtgcagccgggtcaggaagtgatcggtctaggtcggaacaggagaatcagttagacacaacggatgtgtttgagcctttggaaaacggtatcgttaggcatgtggcaaaaacgttggggtacttgaaaaaaaaggctggccatgggttagtaaaaagctagatatgtgaaaatattaggtaattattaactcaaaagaaaaaaaaagattgtacaggaattgtggcatggttttatactgtagcagtgaacagcaggtactcaatcatgaagagctaagcctgatttcatcacgacagctgtgaaagttgcaggtaccagaatggaactacttccaccaatccctaaacaaatggagtcgggaggccacgaagggggagctctcatgcaggaatacctgcagcaggcctcctcacaagacgctcctgcacgtcctgcacgtttgcctgtaaccggacttactgcagggaaa

SEQ ID NO: 58561 - DNA, 3331 bp, Homo Sapiens
ggcacgaggtccccgcggcggcggcggctgcccagtgacagcggcggcggtgccaggtcggccgtggtagcgtagggttgcgcggcccggaaacgcagagccggccaaagagcggcgcgacgtgagccggggccgtgcgcgaagagacctcgcgggcgcggagcgaaaggccggcgtgagtgagcgcggagacagtggccgccggcggcccaacccgtctatcccttcggccgccgccggcatgagccacatccagatcccgccggggctcacggagctgctgcagggctacacggtggaggtgctgcgacagcagccgcctgacctcgtcgaattcgcagtggagtacttcacccgcctgcgcgaggcccgcgccccagcctcagtcctgcccgccgccaccccacgccagagcctgggccaccccccgccagaacccggcccggaccgtgtcgccgacgccaaaggggacagcgagtcggaggaggacgaggacttggaagttccagttcctagcagatttaatagacgagtatcagtctgtgctgagacctataaccctgatgaggaagaggaagatacagatccaagggtgattcatcctaaaactgatgaacagagatgcagacttcaggaagcttgcaaagatattctccttttcaaaaatcttgatcaggaacagctttctcaagttctcgatgccatgtttgaaaggatagtcaaagctgatgagcatgtcattgaccaaggagatgatggagacaacttttatgtcatagaacggggaacttatgacattttagtaacaaaagataatcaaacccgctctgttggtcaatatgacaaccgtggcagttttggagaactagctctgatgtacaacaccccgagagctgctaccattgttgctacctcagaaggctccctttggggactggaccgggtgacttttagaagaatcatagtgaaaaataatgcaaagaagaggaagatgtttgaatcatttattgagtctgtgcccctccttaaatcactagaggtgtcagaacgaatgaagattgtggatgtaataggagagaagatctataaggatggagaacgcataatcactcagactaaatcaaacaaggatggtgggaaccaggaggtcgagattgcccgctgccataaggggcagtactttggagagcttgccctggtcaccaacaaacccagagctgcctcagcttatgcagttggagatgtcaaatgcttagttatggatgtacaagcattcgagaggcttctggggccctgcatggacatcatgaagaggaacatctcacactatgaggaacagctggtgaagatgtttggctccagcgtggatctgggcaacctcgggcagtaggtgtgccacaccccagagccttcttagtgtgacaccaaaaccttctggtcagccacagaacacatacagaaaacagacatgacagaactgttcctgccgttgccgccactgctgccattgctgtggttatgggcatttagaaaacttgaaagtcagcactaaaggatgggcagaggttcaacccacacctccactttgcttctgaaggcccattcattagaccacttgtaaagattactccaacccagtttttatatctttggttcaaaacggcatgtctctccaacaatttaagtgcctgatacaaagtccaaagtataaacatgctcctttcctctcttgctgctactcttgcttttggaagttaccacagggtctgcagaaacctgttgtataactgtagacactctctaatggttctcaaaggaggaaatgtagccttcagtctcctcatttgtcctttgaggaagtccacatttgttcacagttgcagcctttggttttacagtgggaaatggtggtggatgatatggacatatgtagcccagtggcattgtactttctgctgacagctgcacacattacagctgtctccaaacccacagtgatgcttagggaaagaccctgctcaggacccagcaggtcagcaccccagagcagactgataggtccgtgggacccatgttagagcagaaaatttgggctcagcacattttactgttagtagagagccaggaaacgttttctgggttggggattttgtgggattttttaatttttttagtaggttttgtttaacctctgtgcagtttgtatgaatgaattgctatacatttataaggagccagggtctggagggttgctatcactttgtccagcccaaataccttcctgggcaactcctaccatttgtttgcagttgcctctactagctgatggcagtatgctggaaagaggttgtactataaagagagttctttccttctactccagagttgttgtgtagctttgccattgaaccgatcaatttttaaactctttaaagaagcagcagctatttttttgaaattaaagaaaattctcaggccaggctcaatggctcatgcctataattgtagtgctttgggaggctgagctgggaggatcgcttaagaccagcctaggcaacagagtgagatcctgtctctacaaaaacaaaaattttttttttgttttctttttgagacggagtttcgctcttgttgcccaggctggagtgcaatggtgcggtcttggctcaccgcagcctccgcctcccagattaaagtgattctcctgcctcaacctcctgagtggctgggattgcaggcatgcgccaccatgccgggcgaattttgtatttttaatagagacggggtttctctgtgttggtcaggctggtctcaaactcccaacctcaggtgatccgcccacctcggcctctcagagtgctgggattacagatgtgagccactgcacctggcaaaaaaaaaatttttttttaatttgtcaggtgtggtgatgcatgcatgtagtcccaaatacttaggaggctgaggtggaaggatcacttgagcccaggaggtcaaggcaacagtgagctgtgatcatgccactgcactccagtctgggtgacacagtgagaccctgtctcttaaaaaaaaaaaaagaaagaaaaaaaattattctttaggtaatttcacttggacatattcatgtatatggagtttgtcagctgactcaggcatttaccctaaagatcaaatctgttttcaaaaattggcattggccaggcacggtgacccacacctgtaatcccagcactttgggaggccgaggcgggcggatcacgaggtcaggggttcaagaccagcctggccaacatggtgaggccccgtctctactaaaaaaaaaaaaaaaaaa

SEQ ID NO: 58562 - DNA, 601 bp, Homo Sapiens
ttttttactattttttctaataaattatatttatttacaaaaggtctaattttatataactatgaggttcttttacatcagaataatatataaacagaggtgaaaatctggtaattacaaacacagaaaatagaaaccttgttcccttatttattactcacctttcagaacaagtccttggctcagttgtagaggtggggaagaccaacacctaccgaagtttgcaggcaggagcccccaaaaatgtttataaataacacatttagataccctaaggaacagcagtgaagaatagcatcaaggaatggcttagtttgaatctgatctaattcaccagccactcactgtttcattgtccacgactaggggcagggaggattagccagtatgaatgtcaactttacaagtagggtaattaccatcaaattaacaattaccaatcactagcactgagatggctttgaactagatcctactgagaatcacaaaagcagttttgatagtcttaagctattatagctaagtgtcttaaaatggagggttagggagaatgtgtgggtaattagagcaaaatcatctctcactttccacctcaccttta

SEQ ID NO: 58563 - DNA, 4470 bp, Homo Sapiens
gtggttatggagcagctgccgggggtgccaccaggccccccccaccccgttcgaccgccacccccgcctccaccacccatgcccctgcagctcgaggcccacctccgcagccatggcctggagcccgcggcccccagcccccgcctgcgacccgaggagagcctggatccgccaggcgccatgcaggaattgctcggggctctggagccgctgcccccggcgcctggggatactggcgtaggcccaccaaactcggagggcaaggatcccgcaggcgcctaccgcagccccagcccgcaaggcaccaaggcgccgcgtttcgtgccgctcacctccatctgcttccctgactccttgctccaagacgaggagcgcagcttcttccccaccatggaggagatgttcggtggaggggccgcggacgactacggcaaggccgggccacctgaggacgagggggaccccaaggctggcgctgggccaccccccggcccccctgcttatgatccctatgggccctactgtcctggccgggcgtcgggagccgggcccgagacaccgggcctgggcctggaccccaacaaaccgcctgaactgccctccacggtcaacgccgagccgctgggcctgatccagagtggcccccaccaggcggcgccaccacccccgcctccgccaccgccgcctcccgcgccggcctccgaacccaagggtggcctcacctcgcccatcttctgctctaccaagccaaagaagctgctcaagacatcctccttccacctgctgcggcgccgcgacccacccttccagacccccaagaagctgtacgcccaggagtacgagttcgaggcggacgaggacaaggccgatgttcccgccgacatccgcctcaacccccggcgcttgcctgacctggtctccagctgccgctcccgtccggccctctcgccactgggggacatcgacttctgcccacccaacccaggacccgatggcccccggcgccgtggccgcaagcccacgaaggcgaaacgtgatgggccaccccggccacgggggaggccccggatccgccccctggaggtcccgaccactgcggggcccgcctcggcctccacgcccaccgatggcgccaagaaaccccggggccggggccgaggccggggtcgaaaggctgaggaggcagggggcacccggttggagcccctgaagccacttaagatcaagctgtctgtgcccaaggctggcgagggtctgggaacctcatcgggtgatgccatatcaggcactgaccacaacagcctggactcgagcctgactcgggagaagatcgaggccaagattaaggaggtggaggagaagcagccggagatgaagtcgggtttcatggcctccttcttggacttcctcaagtcaggcaagcgccacccaccactctaccaggcgggcctgacgcctccgctcagccctcccaagagtgtgccaccctctgtgccagcccgaggcctgcagccccagccccctgccacccctgctgtgccacatcccccaccttccggagcctttgggcttgggggcgccctggaggctgcagagagtgagggtctggggcttggctgcccttcaccctgcaagcggcttgatgaggagctgaagcggaacctcgagacgctgccctccttctcctcggatgaggaagactctgtcgccaagaaccgagacctgcaggagagcatctcctccgccatctctgccctcgatgacccaccccttgctgggccaaaagacacttccaccccagatgggccgcccttggcccccgcggctgcagttccagggccaccccctcttccggggctccccagtgccaacagcaatggcactcccgagcccccgctgctggaggagaaacccccacccactccacctcctgccccgactcctcagcctcagcctccgccaccccctccgccgccacagccagccctgccctcgccacccccgctggtggcccccacgcccagctcaccaccgccaccgccgctgccgccgccacctccaccagccatgccctcgcctccaccaccacccccaccagccgctgccccactggctgctcctcctgaggagcccgccgccccgtctcccgaagaccccgagctgccggacacccggcccctgcatctggccaaaaagcaggagacggcggcagtgtgtggggagacggacgaggaggccggcgagagtggcggagagggcatcttccgggaacgggacgagttcgtcatccgtgctgaggacatcccttccctcaagctggcgttgcagacggggcgtgaacccccacccatctggcgagtccagaaggcccttctgcagaaattcactccggagatcaaggacggccagaggcagttttgtgccaccagtaattatttggggtattttggggatgcaaaaaatcggtaccagcgcctctatgtaaagttcctggaaaatgtcaataagaaggactacgtgagggtctgtgctcggaaaccctggcatcggcccccagtgccagtcagacgctctgggcaggccaagaaccccgtatctgctgggggtagctctgcacctccccctaaggccccagcaccacctcccaagcctgagacccctgaaaagacgacatctgagaagcccccagagcagactcctgagacggccatgcctgagccccctgcccccgagaagccctccctcctgcggcctgttgagaaggaaaaggagaaggagaaggtgacacgtggagagcggccattgcggggtgagcgggccaccagcggacggcagacacggccagagcggagtctcgccacgggacaacctgccacatcccggctgcccaaagcccggcctaccaaggtgaaggctgaaccgccccctaagaagaggaagaaatggctgaaggaggcaggcggcaacgctacagcaggcgggggcccaccaggcagctcctcggactcggagtcctcccctggagcccccagcgaggacgagcgggcagtacctgggcgtctgctcaaaaccagggcgatgcgggagatgtaccggagctacgtggagatgttggtgagcacagcacttgacccagacatgatccaggccctggaggacacgcatgacgagctgtacctgccccccatgcggaagatagacggcctgctgaatgagcacaagaagaaagtcctgaagcggctgtcgctaagcccagccctgcaggatgctctgcacacgttcccacagctgcaagtggagcagagtggggagggctctccggaagagggggctgtgcggctgcggcctgctggggaaccctacaaccgcaagacgctcagcaagctcaagaggagcgtggtcagagcccaggagttcaaggttgagctggaaaagtcgggatactatacactctaccattcgctccaccactataaataccacaccttcctgcgctgccgggaccagaccctggccatcgagggcggcgccgaggacctgggccaggaggaggtggtccagcagtgcatgcggaaccagccgtggctggaacagctctttgactccttcagtgacctgctggcccaagcacaggcccacagccgctgcgggtgaccccgccccagcttgtgaggggggcgcctcctccatgaaccgagaattgggacagaaccgtgtcctcaggagctaacacctgggctccatcgccggggaaagggggtcatgggtcagggtgtgtctgtgctgccccctccagggcagggttcaaagtccgactcccgcgcccgccaagaagccgctttccgctggcccgcagccgccgcgacttcggcacagtttctccctctggctagtctcccaaacggtttccctctccccttgccccgaccccccctccacagccacagcccccgccccctccaccttgtacataatgtataggaaaagtctatgtatggctggggggggtggggtggcttcagagagctgggggaccccttccccccaagtcccccctgcaggccaagatctttgctaaaggccattccctccgcagggcatttggcgtcgggtgggaggggaaaacgcatcttgttaattatttttaatcttatttattgtacatacctggggcaggggcttggggaggtggaggggggagaagggtcccctctctctgcccctcccactccttttctacggcgatttgtctgtgtctggcccccacccactgcccatcccccattgttgtctggatgtggttctattttttatcggtctcctttcccctcctccccgttctcgcccccgccccaccccctgctcccactaccctttgtctcttgctctttcttgggcttctgtacaactcaacttgtatacactgtgtacacacaaccagccaaacgaaaacccaacggcaaacacttt

SEQ ID NO: 58564 - DNA, 607 bp, Homo Sapiens
  misc_feature (97)..(97): n is a, c, g, or t
  misc_feature (99)..(99): n is a, c, g, or t
  misc_feature (606)..(606): n is a, c, g, or t
ttttgtgccagaacagagactcaagccaggtttaatgatcattgtctagttttcagagcccagaggtccaagatttgccagcctaggtgtacacaantnggaggaatggggtcttggacacgggaggcctgcttgctttgtcagcagagtacgaggaagtacagaggtaagaacacacagaaaactggatccatctgctttgctctccccagctggggtcgtaccctctcctgggcccctttcttgggccccataaatacaaaataataataataataataattacacagattgtagagccctgtcatcctctgtctccagggacacctgcttcctcgggagacatgtctggtttatgggtgtggggtagggtaagaggaggtggtgatctctcggccttttcttatacccacacctggcagttttcaacacagggttctagtgcgcttacatatgctgatattcaattctccaattaaaaagctacctttgggttctatcacctgaaaccacgggaagaaacaaatcaaatctcctgggtaaggcagccaggtacatctaccaggtggtctcaaactcaaggccaactagtggatatagtcaggnt

SEQ ID NO: 58565 - DNA, 510 bp, Homo Sapiens
tttgttcaccaagttggtttatttgaaagatataagtgattctagatacaaactagagaacatttgtaagttgtcaaagaagcctacaggtggtggggtagaggtggggagttctcagcactatcattttaaagttttgctctttagtattctaaattgctgggatgttctcaattatttttaaatcccattttaaaatattttcataacgttttcatttttatatatttttgaggtaataaaatagtatctctatgagcaaatttggtttatttccatatacagtactatgaaataagaactatccgctatttctcacctttcctgtgtactatttatgattgttttcattgtgataataggtagcagaatgatgagcatccctatcacttactttagaacattgttttataagagatgaagtgaaacaaaaaacttgtttgggtaggttttgtgattgtgtgcttatctcaggctcaaaactttacataattaagcccagctggttca

SEQ ID NO: 58566 - DNA, 1180 bp, Homo Sapiens
cgggggaggagcccaagatgcctctgctgctccttggagagacagagcctcttaagttggagcgggactgccggagcccagtggacccctgggctgctgccagccccgacctggcacttgcttgcctgtgtcactgtcaggatttgtctagcggcgcattccctaacaggggtgtgttggggggagtcctctttccaactgtcgaaatggttatcaaagtgtttgttgctacatcttctgggtccatagcgattaggaagaaacagcaagaagtagtgggttttttggaagcgaataaaatcgactttaaggaattagatattgctggagatgaagacaacaggaggtggatgagagagaatgttcctggagagaaaaaacctcaaaatgggattcctttgcctccccagatcttcaatgaggagcagtactgtggggattttgactctttcttctctgcaaaagaagagaatattatttattccttccttggtttggctcctcctccagactcaaagggatcagagaaggctgaagaaggtggagaaactgaggcacaaaaagagggcagtgaagatgtgggcaacctccctgaagcccaggagaagaatgaagaagaaggagagacagccacagaagagacggaagaaatagccatggagggtgcggaaggggaagccgaggaggaggaagaaactgcagaaggagaagagcctggagaagacgaagattcctaggccttttcatgcttcatttcttccacttctccagaaaatggaagctatgaagcaacatttcaaatgtctctccacaaaccaaactcaacagaatactttggcttgaagccggcacacccagggttactgaggacttatgctgcctgacctggttagatgtacatggaggtatctcccgaatcaataccttcatgtgcctgacagtcttggcttttgaagatttttttttcttttttgctctgcgatagctagaccatcttattaataatactctgaaaaaaatgatttcaaggcatggaagttctctgtgatacaacaatacgtattcttcaaatgcgccttatgctacttatctcagaaacaggttttaaaatgaagtgctttccagagaaccatcatataaataaagattaatagaaaaataaaaaaaaaaaaaaaaaaaa

SEQ ID NO: 58567 - DNA, 572 bp, Homo Sapiens
  misc_feature (529)..(529): n is a, c, g, or t
tgctcatttactgtttttaatatgtagtcaaatatgacagcagtcttacacaaatagctccctcctcccccttctaaaatcccaaatttgttgactcctactgtaagtgaaaaacatggtttgcttctgaaaatagcaatcaacagcaaaaacacaggtaacatttggtccccaccagcttccacacctttaaagataaattgtgtcactgagggcagtcatacactaaatttcttatcaaactattactaggggaaaaaaatcagatttcccacacactgtaagcagaaccgaaagagctgcagagaaacttggtttaagaagctgtgtgaagaaaacattaatgacttattgcaattgtaataatccccaggtaaaagatggatgtcaaattaatggactgtaaggaaatacattcaaacttaggtcattaatattacagtgaacataatcaggaagcttgcagaagtatgtagcatctctgaattattgaatttgaacaaaggtttccaatagaggtcacactctntttgctctcagacaccattagtgcagattcagatacaatcatt

SEQ ID NO: 58568 - DNA, 2155 bp, Homo Sapiens
gtcacatggggtgcgcgcccagactccgacccggaggcggaaccggcagtgcagcccgaagccccgcagtccccgagcacgcgtggccatgcgtcccctgcgcccccgcgccgcgctgctggcgctcctggcctcgctcctggccgcgcccccggtggccccggccgaggccccgcacctggtgcaggtggacgcggcccgcgcgctgtggcccctgcggcgcttctggaggagcacaggcttctgccccccgctgccacacagccaggctgaccagtacgtcctcagctgggaccagcagctcaacctcgcctatgtgggcgccgtccctcaccgcggcatcaagcaggtccggacccactggctgctggagcttgtcaccaccagggggtccactggacggggcctgagctacaacttcacccacctggacgggtacttggaccttctcagggagaaccagctcctcccagggtttgagctgatgggcagcgcctcgggccacttcactgactttgaggacaagcagcaggtgtttgagtggaaggacttggtctccagcctggccaggagatacatcggtaggtacggactggcgcatgtttccaagtggaacttcgagacgtggaatgagccagaccaccacgactttgacaacgtctccatgaccatgcaaggcttcctgaactactacgatgcctgctcggagggtctgcgcgccgccagccccgccctgcggctgggaggccccggcgactccttccacaccccaccgcgatccccgctgagctggggcctcctgcgccactgccacgacggtaccaacttcttcactggggaggcgggcgtgcggctggactacatctccctccacaggaagggtgcgcgcagctccatctccatcctggagcaggagaaggtcgtcgcgcagcagatccggcagctcttccccaagttcgcggacacccccatttacaacgacgaggcggacccgctggtgggctggtccctgccacagccgtggagggcggacgtgacctacgcggccatggtggtgaaggtcatcgcgcagcatcagaacctgctactggccaacaccacctccgccttcccctacgcgctcctgagcaacgacaatgccttcctgagctaccacccgcaccccttcgcgcagcgcacgctcaccgcgcgcttccaggtcaacaacacccgcccgccgcacgtgcagctgttgcgcaagccggtgctcacggccatggggctgctggcgctgctggatgaggagcagctctgggccgaagtgtcgcaggccgggaccgtcctggacagcaaccacacggtgggcgtcctggccagcgcccaccgcccccagggcccggccgacgcctggcgcgccgcggtgctgatctacgcgagcgacgacacccgcgcccaccccaaccgcagcgtcgcggtgaccctgcggctgcgcggggtgccccccggcccgggcctggtctacgtcacgcgctacctggacaacgggctctgcagccccgacggcgagtggcggcgcctgggccggcccgtcttccccacggcagagcagttccggcgcatgcgcgcggctgaggacccggtggccgcggcgccccgccccttacccgccggcggccgcctgaccctgcgccccgcgctgcggctgccgtcgcttttgctggtgcacgtgtgtgcgcgccccgagaagccgcccgggcaggtcacgcggctccgcgccctgcccctgacccaagggcagctggttctggtctggtcggatgaacacgtgggctccaagtgcctgtggacatacgagatccagttctctcaggacggtaaggcgtacaccccggtcagcaggaagccatcgaccttcaacctctttgtgttcagcccagacacaggtgctgtctctggctcctaccgagttcgagccctggactactgggcccgaccaggccccttctcggaccctgtgccgtacctggaggtccctgtgccaagagggcccccatccccgggcaatccatgagcctgtgctgagccccagtgggttgcacctccaccggcagtcagcgagctggggctgcactgtgcccatgctgccctcccatcaccccctttgcaatatattttt

SEQ ID NO: 58569 - DNA, 939 bp, Homo Sapiens
cagcagaaaagataaagataaaccaaaaatatataccccccaatggaaaataatgttgattcagcaattcccataggatgtattacatgctctaatttattatattattatttatctgtcttgatcttgcccatgtactcttaaaaagatgtgggatgttgattgcgatttttaaacaactagataatgtataaatcagcagtggaaatcagttttaatgtgtggatgtgtctgattatgttaaatgcctctttttttactttttttttttttagatgtataatgtttcataaacccgtggcacgggtcacaaagctcagctgtgaaaatgaaattggtagtatttttaaacatgaatgtcaatttcacagtgtattttgaaatggttcctccaggagagatattggtgcaccattaggaaaatcttctctgcagaggaagtagccttcttgggagaaaatggaaaatgggttctgatatgtgatctcagagtagcccatttcctagggcaccatggaaaacacaaatgtgatctttaagtatacctcttccccagttggggaggaaggactcagttggcacccttttgtttgttcactaacaatgtcttacctttctggctactctgcttgtcgggtgggacggcgctggtaactctccctcggtccttgttattacatctagcaggaactactgatgcggatcagatcccggaccaactattgcgttctggtccatgccgggtaaaatgctgcccgtggccctcacaataaaatggtgctcttcgcaacacaacaaaaaaagggggccgaagtaccgggcagaaggacagtatggcaggccaggggagaaaaggggggaaccagaagaaggataggaacactggtggacaccacaccgtaatagtacggtgaacgaggacgcaaacttacacaacgg

SEQ ID NO: 58570 - DNA, 543 bp, Homo Sapiens
  misc_feature (326)..(326): n is a, c, g, or t
  misc_feature (470)..(470): n is a, c, g, or t
  misc_feature (506)..(506): n is a, c, g, or t
  misc_feature (510)..(510): n is a, c, g, or t
  misc_feature (512)..(512): n is a, c, g, or t
  misc_feature (518)..(518): n is a, c, g, or t
  misc_feature (520)..(520): n is a, c, g, or t
  misc_feature (542)..(542): n is a, c, g, or t
caaaaacagattctaacaagtacaaagaaataattaacaaaagctcatgtgtgcccaaaataaagatagagatgtaggcataaactctataccatggacaccttctatgagtcacgaaaatatcagtcatatatatactggcacttagtctggtacatgcaaatttcaaggcaattcctctccatctgagaacgaggaattgtgtcattttaaggccaaattgcagtccaattgccacaagtgcaaaaccaccccacataaccacctatttgtaatcatggaatgatagcctcaaccaaccaattgtgccatacatcattgttaanacttctttggctcattttagtatagatttaaaagtaaaaattgcaaaagatgataaacatctattattttgtaaaagttacaagctcccattccaggtgtcagccctgtagtggttctccagcctagctgccataagaagcatnaccaggacaccaggatgattcaacccgaagatttcnaaangncctcangngattccaaaggcaaccccgtgnt

SEQ ID NO: 58571 - DNA, 562 bp, Homo Sapiens
tttatagtgaaaacattatattataacatgcttttgcaaacaaaatattaaaattaataatttttaacatattctttaaattctacatgcatacttttgaatatctaaactacatgttaaacagctgaatacattctactcacacttcagatctttaaacaccaacaatctatgaatattaatctattactacaggacaaatttggatatacgtcttggataaattttaagctcactttaagagcaccaatcattaacaatcatttgtgtattttattcacaaacactgatacgatttgtttatttatgttaaaacaaacattttctttaaaaatgaatgtgtattaaagtagtttaactggtagaataggctttattccaatctgtttgttaaacagcctattttcacaatatctatatctacttttcattgatctgttccatcattactaacatatttgttcaaattattaggactattttttcaaagggaggaataatcaaattccccagtccatatatcttataaatattttacacctaatacacacagctttacagt

SEQ ID NO: 58572 - DNA, 592 bp, Homo Sapiens
ttttatgtataaatgctttattttgtatttgctatttgatcaatgccagaaaaatgaaaccacaacaccaaagtacagaccagtatttttgaaggggataataatcatttgagataataaactactagaaaatcagaagaaatgattcaaggtattcatttcaaaggctaaaccactaattcttcatccaaacgaatgtttccactgtgagtcaatacatttgccatcagttctttttaatgctatcctgaatacacaatatacacctaaaaacatgatagagtgctctgagaatagcaagaactgatagccaacatgatttacagaaatttatggctatgtagcaacggttcagagacaatctctagaaaatatgaaggtactcttcatgataggaaaggattggttttgcagggcagcttttaagttcatttctgattgtctttaaataaccactctacctttgtcccttgatctcaccccttgctaaaattttataaacatattccagacatactgcatgcaaaaagggaagtataagaatattaagattctcatgccctggacatgaatagaaaacatgtacataatg

SEQ ID NO: 58573 - DNA, 559 bp, Homo Sapiens
  misc_feature (127)..(127): n is a, c, g, or t
  misc_feature (287)..(287): n is a, c, g, or t
  misc_feature (312)..(312): n is a, c, g, or t
  misc_feature (420)..(422): n is a, c, g, or t
  misc_feature (508)..(508): n is a, c, g, or t
  misc_feature (521)..(521): n is a, c, g, or t
  misc_feature (536)..(536): n is a, c, g, or t
  misc_feature (548)..(548): n is a, c, g, or t
  misc_feature (550)..(550): n is a, c, g, or t
cttatcaaaagtttgttttatttccaatacaagataaataccatgcttgttactagtgcagtttaaggccgacaatggccatatatcaaactgccgaacagtcacctaaatgctaaagaaaggaaanacaaagtaaacattaaacacaaaattgcaattacaaacattttaataaaatggaatgagctttttaattgaagctaatatgaagtctaattctcatggacagcaaaaaaaaaaaaaaaaaaagtctattagatcaattatcaccttaccttttggcacanaaatcttattgtgaagtcaccatanagtcaatagctaaaattttaagactttctttggccttctgatattaaacaaattatttacaaactgtgatcagtaattcgtggatattgggtaaaatgatacaatttnnngttgttgttgttaagggctttccattaaaaattgtaaaacaactttgttaggctgttacagggctgtaaactactttgctaatatnccatggggatgcnaaggaaggaatattnaacctttttttnanggttaaatt

SEQ ID NO: 58574 - DNA, 549 bp, Homo Sapiens
tttttgttttgttctttttaatgcacccaagcattaatttagtcccttaaggattttacttccccaaacaaagaactttctggaaaagggagataaagccatagaggcaacacagtcacatcacctcttataaatatcttccagccacttttcatcatcctgttcttcatcgtcgattggctcctcggtttccagtggagttgggataaagaagtatggcctcagggggggcttgctgacgtgagacttaagtccaaacttgcgcttcagcaggtggaactgctctttgacgtagtggtaaaactcgtactcgtatctcatccgctggtagaggatctgcacagcctcaggagaggggacagtcttcttcaccgtcacagtcatgtttccaagcttcctgtgctctgggtctttgtagatactgagcacgcccttgaagtaatgaggtaaaaatctttccagtaacagcagcacatcttccaactcttcaagaatccccacgagccagaaggtttcattcacgttcagctttgctctctcaagggccca

SEQ ID NO: 58575 - DNA, 661 bp, Homo Sapiens
ggagtggcagccggagtctgaactgtcctgggggaccaagcaggagcttaagatgggcaagacctggggccctgggcagacgcatcaaagcaggcagaagcaggcatggccagcaggaagaccaagaagaaggaagggggtgccctccgggcccagagagcctcatccaatgtcttctccaactttgagcagactcagatccaggagttcaaggaggcattcacactcatggatcagaaccgagatggcttcattgacaaggaggacctgaaggacacctatgcctccctgggcaagaccaacgtcaaggacgacgagctggacgccatgctcaaagaggcctcggggcccatcaacttcaccatgtttctgaacctgtttggggagaagctgagcggtaccgacgccgaggagaccattcttaacgccttcaagatgctggacccggacgggaaagggaaaatcaacaaggagtacatcaagcgtctgctgatgtcccaggctgacaagatgacggcggaagaggtggaccagatgttccagttcgcctccatcgatgtggcgggcaacctggactacaaggcgctcagctacgtgatcacccacggggaggagaaggaggagtgagacccagccgggtcaataaacctggacgcttgga

SEQ ID NO: 58576 - DNA, 413 bp, Homo Sapiens
aggataatgctgtttattaaaaatatagtcagggagaaggaagtcagtgcatttatgcacattttacatacacatctgtagtttgaggttccattattccaacagttcatataaatcactgtttcagataaaaggaaaaaaatgctttacacaggagatcagcaattggttataggtttggaaatatgagtcggcttgtagtaaaaataaaaccacctcttccattattaaagaatgtctccttcatgcagaacaagtctttagcattaagaacttttccttgcataagaattgttaacttgaagttcttggagaacagccaatcctgttttctatatttataaatgctattttgtctggatttttttttttgaggtaacaaaggaagcatcttcagtgatttgtcactaggt

SEQ ID NO: 58577 - DNA, 2042 bp, Homo Sapiens
tgctgagctaaagtgggaaggagcagtaacaccaaaggaggctaattctcttcctgtcagtaggagagagtgtctgcccccagtgtgtgaaaagggaaggcatgagaagtgaaaaatcagccttctggaagcaccttcttaccacgagaaaacaggtgattcttactatctttgagactcatccagattgtgtctgtttaactcttcaggcaatatgaaggcagagaagccatttcagagaagagattttttaaaaaatcatttcgttctttggcattgtcacaggattatgatgtgggttctcatagaaatttcactccccccaaagccacccaaaggaaaggcagtgaaatggggaggaacacacatttgcctggcatcgcaagagctgccttgtagtcatgggttccagtgatcttggaccgatctcttcacttccctggacctcagtttcttccatacaaagaagttgaactggatcatagaaaagatgctgtccagcttggtaatatcagatagggagcagaagctgtctcttagcacatggccagattccggaacaacgatgatggtctccatgtttgtcctaaaaatgcatctcatctcagtagagattttcttccacctcatttgggtctcaatttaaggaaggaagaaaggaaagaaacccggggattctcttcttgaaaggaatatacttcactttctctaggctcctaggataaaaacttcctatccttcatttttcctctttaaccctgccaaaatcaagttgagtaaagataccatacagatatgaaaaagaagccacatccttaaattttcatggagtccaagagcctgctcaccgccagttagcttttcccaggatggtggtggcactgatcatctaggttgcacttttatgttcatgtcccagagcgtttcccatcagccatctcatttcatcttttcatcattcctctgaggaaaagacttcacacatgtataggactttctatatcacaaagtatttcatatccaatgtcttatttagatcttgacaatcactgtttaaggtaatttggcaagttattaatactcatgtcctcattttactgaagaggaaactgaaatgcagagagcttgtcttttgcccaggatcactcacccagtttattgggaggcagcagcacggggattaagaacatgggttatgccgacaaccaaccaggcagaattccagctctgtcagtagttagctgtctggccttaggaaagggatttcacacctctgtggcttagtttccttgtccattaaatgctcataagaatagagctttcctcacagagattgggtgggcacgggagctaaatgagctcatacgtttaagaacaacctctagcacacagtgcataataaatgtcattattattagcaaagccaggacctgggtcttccagcttctagctcagtggcatttctgctgccccacaccaggactatccttcgtatacaggtatgaacctaaagccttcagtgtttcaatgaaaagttcacccaaggtctttctgttcagtaagtctagagctaagggctcctggcactctgttcagtcctttcgctggtaaaccacgctgccctccgttgctctgggcagaatgtcaaaccttcttatgtttttagaatttataaatcaagcactcttatttaatattactgacagcccgaaggcagacgctcccactctcctggggaagagggtcttctaatctgccatcttaaggaggtaaaagggcttgattgagtaactcattgcaatgggcacgtatttattactgtctcccggccttttctcatgctgtttgtctgctggaattaccactagtgccaggccatttgaatatttgaccatttgtcttagaattctctgaatacaaatgtttttcatacctttactatgtactttttaagaatgaagactatgttgcatgttggtttgtactctctcctgcacataaaaaatgcttagtaaatagatacacaaaaaaaaaaaaaaaaa

SEQ ID NO: 58578 - DNA, 546 bp, Homo Sapiens
aaacataccaggatttttttatttttcagtgtaaaaatcaaacatgataaacctagaaaactatcagcagggctatttcttacagggttccagcaagggttagcattgttacatttcagaagctgactttctttaaaccatctttacagaggagtaaacttcacagttccacacatggctgggctccaggtagaactccataagagtgacgagggaaagtcaccactgggcagggagggcatttctgagaaatgcagatgagaggagaggctgtgagcacaggctgtgtcaaaacccagggcaagggctccctcccgccttccctcccagtgggaaggccaccctgagccccaaaccacattctgttccttcctcgtcattctgcagacaatggtcatccacagaccacacgtgtggtggctttggcaaccagaaatttaaaataagctatggtttttccagtagccaaaatgatcctgcaccaaagctcatagactgagaacctgagcatgcaaaaccacagtctgggtgaagggatgtctgctt

SEQ ID NO: 58579 - DNA, 3610 bp, Homo Sapiens
gaattcttcgtaggaattatcttttccctcctctcacccgacagcctgcctatttccaaaggaaaaaaaaaaagcgtgttgagtacgttctggattactcataagaccttttttttttccttccgggcgcaaaaccgtgagctggatttataatcgccctataaagctccagaggcggtcaggcacctgcagaggagccccgccgctccgccgactagctgcccccgcgagcaacggcctcgtgatttccccgccgatccggtccccgcctccccactctgcccccgcctaccccggagccgtgcagccgcctctccgaatctctctcttctcctggcgctcgcgtgcgagagggaactagcgagaacgaggaagcagctggaggtgacgccgggcagattacgcctgtcagggccgagccgagcggatcgctgggcgctgtgcagaggaaaggcgggagtgcccggctcgctgtcgcagagccgagcctgtttctgcgccggaccagtcgaggactctggacagtagaggccccgggacgaccgagctgatggcgtcttcgaccccatcttcgtccgcaacctcctcgaacgcgggagcggaccccaataccactaacctgcgccccacaacgtacgatacctggtgcggcgtggcccatggatgcaccagaaaactggggctcaagatctgcggcttcttgcaaaggaccaacagcctggaagagaagagtcgccttgtgagtgccttcagggagaggcaatcctccaagaacctgctttcctgtgaaaacagcgaccgggatgcccgcttccggcgcacagagactgacttctctaatctgtttgctagagatctgcttccggctaagaacggtgaggagcaaaccgtgcaattcctcctggaagtggtggacatactcctcaactatgtccgcaagacatttgatcgctccaccaaggtgctggactttcatcacccacaccagttgctggaaggcatggagggcttcaacttggagctctctgaccaccccgagtccctggagcagatcctggttgactgcagagacaccttgaagtatggggttcgcacaggtcatcctcgatttttcaaccagctctccactggattggatattattggcctagctggagaatggctgacatcaacggccaataccaacatgtttacatatgaaattgcaccagtgtttgtcctcatggaacaaataacacttaagaagatgagagagatagttggatggtcaagtaaagatggtgatgggatattttctcctgggggcgccatatccaacatgtacagcatcatggctgctcgctacaagtacttcccggaagttaagacaaagggcatggcggctgtgcctaaactggtcctcttcacctcagaacagagtcactattccataaagaaagctggggctgcacttggctttggaactgacaatgtgattttgataaagtgcaatgaaagggggaaaataattccagctgattttgaggcaaaaattcttgaagccaaacagaagggatatgttcccttttatgtcaatgcaactgctggcacgactgtttatggagcttttgatccgatacaagagattgcagatatatgtgagaaatataacctttggttgcatgtcgatgctgcctggggaggtgggctgctcatgtccaggaagcaccgccataaactcaacggcatagaaagggccaactcagtcacctggaaccctcacaagatgatgggcgtgctgttgcagtgctctgccattctcgtcaaggaaaagggtatactccaaggatgcaaccagatgtgtgcaggatatctcttccagccagacaagcagtatgatgtctcctacgacaccggggacaaggcaattcagtgtggccgccacgtggatatcttcaagttctggctgatgtggaaagcaaagggcacagtgggatttgaaaaccagatcaacaaatgcctggaactggctgaatacctctatgccaagattaaaaacagagaagaatttgagatggttttcaatggcgagcctgagcacacaaacgtctgtttttggtatattccacaaagcctcaggggtgtgccagacagccctcaacgacgggaaaagctacacaaggtggctccaaaaatcaaagccctgatgatggagtcaggtacgaccatggttggctaccagccccaaggggacaaggccaacttcttccggatggtcatctccaacccagccgctacccagtctgacattgacttcctcattgaggagatagaaagactgggccaggatctgtaatcatccttcgcagaacatgagtttatgggaatgccttttccctctggcactccagaacaaacctctatatgttgctgaaacacacaggccatttcattgagggaaaacataatatcttgaagaatattgttaaaaccttacttaaagcttgtttgttctagttagcaggaaatagtgttctttttaaaaagttgcacattaggaacagagtatatatgtacagttatacatacctctctctatatatacatgtatagtgagtgtggcttagtaatagatcacggcatgtttcccgctccaagagaattcactttaccttcagcagttaccgaggagctaaacatgctgccaaccagcttgtccaacaactccaggaaaactgtttttcaaaacgccatgtcctaggggccaagggaaatgctgttggtgagaatcgacctcactgtcagcgtttctccacctgaagtgatgatggatgagaaaaaacaccaccaaatgacaagtcacaccctccccattagtatcctgttaggggaaaatagtagcagagtcattgttacaggtgtactatggctgtattttagagattaatttgtgtagattgtgtaaattcctgttgtctgaccttggtggtgggaggggagactatgtgtcatgatttcaatgattgtttaattgtaggtcaatgaaatatttgcttatttatattcagagatgtaccatgttaaagaggcgtcttgtattttcttcccatttgtaatgtatcttatttatatatgaagtaagttctgaaaactgtttatggtattttcgtgcatttgtgagccaaagagaaaagattaaaattagtgagatttgtatttatattagagtgcccttaaaataatgatttaagcattttactgtctgtaagagaattctaagattgtacatgacataagttatagtaatcatggcaaatcctgttacttaaatagcatctgctcttctcttacgctctctgtctggctgtacgtctggtgttctcaatgcttttctagcaactgttggataataactagatctcctgtaattttgtagtagttgatgaccaatctctgtgactcgcttagctgaaacctaaggcaacatttccgaagaccttctgaagatctcagataaagtgaccaggctcacaactgtttttgaagaagggaaattcacactgtgcgttttgagtatgcaagaagaatataaataaataaaatatctcatggagattgacaaaaaaaaaaa

SEQ ID NO: 58580 - DNA, 553 bp, Homo Sapiens
  misc_feature (503)..(503): n is a, c, g, or t
  misc_feature (552)..(553): n is a, c, g, or t
cacagaaccggagtattttattgcaccaagatcttggcaacacgtggggctccccaggcccccggaaaggaggtgcagaggatgggacacagacctctgcacacacacaggtgcggccatgcaaccaggacgcggggcaggcaagtgagaggacctgggagaggtagctgctgtacacaggccccactccctccagctccattcccaagcacaaaattcaacagacccagatcctaagtcaaccaagtgactgctatgacaaaggcttgggttattgacatttacttacatacgtgtacaagacctagagtttgaactcgttttctgggcctcatctttcccttccctatctggttgatgacttcggtggagggaagggacgtgactccacccaacagtgataaacgctgcagaaagtcatctcgtgctcaccactgcccaagaattaacgaatgtatgtaccccaggaaaagggtttacagttatctagtggagaagggaanaaactgatttggaggaaaagaagggagagaaaggacccagataaatttnn

SEQ ID NO: 58581 - DNA, 6747 bp, Homo Sapiens
tgggtctgggttgacagaagtctgcagggctggcagcaaacattccaggccaattccactgccagatcaaagaccaagcgcaaatcctgggggaattggggaggaagccccatgtagacacccaagggaagctttagatggccctgtcttctcaaggaaccctgaaggcagcaggactctcagcccgtctagagggaaagagagcagaactcttccttgccgacagccatgcagttctcaacctgttgctactcatgcttattcctcccattcctctactttactgtgttttagagatggtgacctagggaaggagcctttcaaggctgccccacatactatccacccaccctgtgtagtaccttccagggcctatgaaatggatgagacaggagagatctctaggggacctgatgtgcacttgacacatggccttgagcccaaagatgttaacagggaatttaggctaacagagagcagcacctgtgagccttctactgtggctgctgtcctatctcgagctcaaggctgcagatccccttctgctcctgacgtgaggacaggttccttcagccactcagctactgatggaagcgtggggttaataggggttcctgagaaaaaggttgctgagaagcaagcaagcacagaacttgaggctgcctctttccctgcaggcatgtactctgagcccctgaggcagtttagggacagctctgtaggtgaccagaatgcacaggtgtgtcaaaccaatccagaaccacctgcaacaactcagggaccacacaccctggatttaagtgaagggtctgctgagagcaagttggtggtagagccacagcatgaatgtttagaaaataccactagatgttttttggaaaagccacaattttccactgagttgagggatcacaatcgcttggattcccaagccaagtttgtagcaaggttaaaacatacctgcagcccccaggaagacagtccctggcaggaagaagagcagcacagagaccaggcttcaggtggtggagaaggcttcgcccagggtgtgaatccccttcctgatgaagatggcttagatggctgtcagattttagatgctgggagagaggaggtggctgtggccaagcctcctgtgtccaagattttatcacagggcttcaaagacccagccactgtgtccttgaggcaaaatgaaacaccgcagcctgctgctcagaggagtggccacctctacactggcagagagcagccagcacccaaccacaggggctcacttcctgtgactacaatcttctctggccccaaacactccaggtcctcccccacaccacagttctcagttgtcggctcttctcgttctcttcaggagctgaacttgagtgtggagcctccttcccctacagacgaagatacacaggggcctaacagattgtggaacccacatctcaggggctattcctcaggaaagtcagtggcaagaacatctctgcaggctgaggacagcgatcagaaagcctcatctcgcttggatgatgggactaccgatcacaggcacctgaagcctgccacccctccttatccaatgccttccactctctcacacatgccaacccctgatttcacgaccagctggatgtctggtactttggaacaagcccaacagggaaagcgagagaaactgggtgtccaggttaggccagaaaattggtgctctcagatggacaaaggaatgctgcactttggctccagtgacatcagtccctatgcgctgccgtggcgtccggaggagcctgcacgtatcagctggaagcagtatatgtctggcagtgcagtcgatgtttcctgcagccagaagccccaggggctgacactatcaaatgtggcccggtgctccagcatggacaatggcctagaagaccagaactcccctttccactcccacctcagcacttacgccaatatttgtgatctgtcaaccacacacagcagcactgagaatgcccagggttcaaatgaggcctgggaagtattccgagggagttcttcaattgccttaggagacccccacatcccgacgagccctgaaggagtagcccccacttcgggtcatgacagaaggcctcagttcaggggcccttctggtgaagcagactgtctgaggagtaagccccccttggccaaaggaagtgctgcaggtccagtggatgagattatgctgctgtatccatcagaggcaggctgccctgtgggacagaccaggacgaacacattcgaacagggcacacagaccctcggcagcaggcgccactggagcagcactgacatctcctttgctcagcctgaagccagtgcagtatcagcctttgatctggcctcatggaccagcatgcacaatctgtctctccacctctcacagctcctgcacagtacctcagagctgcttgggagtctctcccagccagatgtggccagaagggagcagaacaccaagagggacatcccagataaagccccacaggccctgatgatggatggctctactcagaccactgtggatgagggcagccagactgacctcaccttacccaccctgtgcctccagacttcagaggctgaacctcagggagccaatgtgatccttgaagggctaggctcagatacctcgactgtgtctcaagaagagggagatgtgccaggggtacctcagaagagagaggcagaggaaacagcacagaaaatggctcagctcctctatcttcaggaagaaagcactccctacaagccccagagcccttcaataccctcatcccacttgaggtttcagaaagcccccgttgggcagcatcttccttctgtgagcccctcagtttctgatgctttcctgcctcccagctcccagccagaggagtcatattgcttagttgtcagcagtcccagtcccagctcccctcattccccagggctctttcccagtacttccgagtatcctggggactccagggtccagaagaagctgggccccacaagtgctttgttcgtggacagggcctcctccccaatcctcactcttagtgccagcacccaagagccgggtctttccccaggctctttgaccctctcagccccttcaactcaccctgttgaaggccaccagaagcttgactccagcccagaccctgttgatgccccaaggactccaatggataattattcccaaaccactgacgagttaggtggctcccagagaggtagaagttccttacaaaggagtaatgggagatccttccttgagttgcactccccacacagcccacagcagagtccaaaactccaatttagtttcttagggcagcaccctcagcagcttcagcccaggacaactatcggggtccaaagcagactgctgccaccaccactgaggcacaggagccaaaggctgggcaacagctttgtgcctgagaaggtggcttccccggagcattgcccactgagcggtagggagccaagtcagtggcagagcaggacagaaaatggaggtgagagttcagcatctccaggggaaccacaacgcactctggaccgaccttcttcatggggaggcctccagcacctcagcccctgccctgtctctgagttgactgatactgcagggctccgaggttctgccttgggcctccctcaggcctgccaacctgaggagttactgtgcttcagttgccagatgtgcatggcccctgagcaccagcaccacagtctgagggacctcccggtgcataacaaatttagtaactggtgtggggttcagaagggctcacctggggggttggacatgactgaggaggagctgggggccagcggtgatctcagctctgaaaagcaggaacagagtcccccacaacctcctaatgaccacagccaggattctgagtggtccaagagggagcagatccccctgcaagttggggcccagaacctctcactcagcgtggaactcacagaagcgaaactgcaccatggctttggggaggccgatgccctgctccaggtgctgcagagtgggacaggggaggcgcttgctgctgatgaacctgtgacatccacctggaaggagctctatgcacggcaaaaaaaggccattgagaccctcaggagagagcgggctgagcgacttgggaacttctgccggacgcgaagccttagccctcagaaacaactgagcctcctgcccaacaaagatctcttcatctgggatcttgacttgcccagcagacgccgagaatacctgcagcaactgaggaaggatgttgtggagaccaccaggagcccagagtcagtgtcaaggtcagctcacacaccctctgacatagagttgatgctgcaagactaccagcaggcccatgaggaggccaaggtggagattgcccgggcccgagaccaactgcgggagcggactgaacaagagaagctgagaatccaccagaagatcatttcccagctattgaaggaagaggataaactacataccttggccaattccagctccctgtgcaccagctctaatggaagcctctcgtctggcatgacctctggctataatagcagcccagccttgtcaggccagctccagttcccagagaatatggggcatacaaacttgcctgattccagggatgtatggataggggatgagcgaggaggccattctgcagtgaggaagaactctgcctacagccacagagcctccctgggcagttgctgctgttcaccatccagtctgtccagcttggggacctgcttttcctcctcctaccaggatttggccaagcatgtcgtggacacttctatggctgatgtaatggctgcttgttcggataatttgcacaacctcttcagctgccaggcaactgctggctggaactatcagggtgaggagcaggcggtgcagctttactacaaggtgttttctcccactcggcatggcttcctgggggcaggtgtggtgtcccagccgctgtctcgtgtgtgggcggctgtcagtgaccccactgtgtggcccctgtattacaagcccatccagacagcaaggctgcatcagcgagtgaccaacagcatcagcctggtgtacttggtgtgcaacaccaccctgtgcgcactgaagcagccacgggatttctgttgtgtctgcgtggaagccaaagagggtcacctgtctgtcatggcagcccagtctgtgtatgatacatccatgccaagacccagcagaaaaatggttcacggggagatcctgcccagtgcctggatcttgcagcccatcactgtggaagggaaggaagtcaccagagtcatctacttggcccaggtggaacttggtgctccaggcttcccacctcagctcctgagctctttcatcaaacggcagccactggttatagccagactggcttccttccttggtaggtagcatctcaccgtcaagatggtgctgctgagatgcaggcccaggctgctcaagagagacactgtggcagctccttgttactttccataccacagtgcaggaaaagctgatgctacctgctgtggccgattggggcagacagcactggcccagggatgctagcaaagcccagtcagtacttggtcacagctggcaccagtgcagagcaaacggcctgagctcctggcccagactatccagagtgaatgcagctctgctcaccttttggatttctcacctttctttcctgtttctgggactctgcggcagacaggacacttaaggaccaggactgggcacagccagcagagccggggactgcagtgctttggcaaggtgcttccgcaggctggtagggaagcaggcagccactggccaagactctgctctgaatctacctcctctagcattcagctctactgtgtgatgggacgttaaaaataccaaaacagaaagagggtttaagaaacagctgcacaaaccagaacaccgattcagaatcttttctccctcttgagtttttgcaaaatactttattattgatttttgctttttttctccctttccctcccaggagaagacatttgggtcttggcctgaggcaggggtgttgagcgatgatgctctgatatggagctgtcactctagagctcggtcagatggaagacactatagaaccaggttggacagatttggggtcagggttgggggctgagttcttttgaggactggttggagtggcagccagatggtggctgctgacaaggcaagaggaatttcagagattaaacattgtcctttgaggaagggagaggaggtgaatgaactcccagaggaggtgagtggcttgttgggaggaagctcagttccagaacttacctcagtgcacttgggaggggtggagtcctgagcattccatgatttctgccctggccccacctatcctaggatggggtgggatggagagtgggttcagttttcttgtactttagcctggctgaacatgaactttgtgtttacctggaagtggtaggggtgggagagattctcatctttagttctggtgcccaaaatctttggtagatggagggaactggggattcagaagatgtggtaaaggtctatttctgtagtgtggcagagatgtgtttttctaaagtgtttgcagggcatttttccctcttacctcagattaagttatttatatattgttgattgaaggttttttaaaattgcttttaaacttc

SEQ ID NO: 58582 - DNA, 480 bp, Homo Sapiens
tttttttttacccttttaaacattttattttgagacaattgcagatgtacacaaaagttgtaaaaataggccacagtgctcccattttgtccttatatcagatttcccatttgtgagtgattctgaacaataagttgcagacatcttgacccactactccttactattccagtgtctatttcctatatacaaagggaatctaccaggtaaccatagtacaacaatcaaaacctggatgttaatactgatccaatatgaatataggatcctcaggtgccattcaacattttgcctcttctcctttatattttaaaattatatatgactacttacatttttctagaagaaaaaatagaacaataaatcacaaaaatgcctctacctctgcactactcccaaaatccaaatcccttgtccagagttatcacttaggcctttatcattcagatactttttctgtgcaacatacacagggctata

SEQ ID NO: 58583 - DNA, 1700 bp, Homo Sapiens
gccgaggctgcctgactggaatgagggtagctgcggcgactgcggcggctggagcggggccggccatggcggtgtggacgcgggccaccaaagcggggctggtggagctgctcctgagggagcgctgggtccgagtggtggccgagctgagcggggagagcctgagcctgacgggcgacgccgccgcggccgagctggagcccgctctgggacccgcggccgccgccttcaacggcctcccaaacggcggcggcgcgggcgactcgctgcccgggagcccaagccgcggcctggggcccccgagcccgccggcgccgcctcggggccccgcgggtgaggcgggcgcgtcgccgcccgtgcgccgggtgcgggtggtgaagcaagaggcgggcggcctgggcatcagcatcaagggcggccgcgagaaccggatgccgatcctcatctccaagatcttccccgggctggctgccgaccagagccgggcgctgcggctgggcgacgccatcctgtcggtgaacggcaccgacctgcgccaggccacccacgaccaggccgtgcaggcgctgaagcgcgcgggcaaggaggtgctgctggaggtcaagttcatccgagaagtaacaccatatatcaagaagccatcattagtatcagatctgccgtgggaaggtgcagccccccagtcaccaagctttagtggcagtgaggactctggttcgccaaaacaccagaacagcaccaaggacaggaagatcatccctctcaaaatgtgctttgctgctagaaacctaagcatgccggatctggaaaacagattgatagagctacattctcctgatagcaggaacacgttgatcctacgctgcaaagatacagccacagcacactcctggttcgtagctatccacaccaacataatggctctcctcccacaggtgttggctgaactcaacgccatgcttggggcaaccagtacagcaggaggcagtaaagaggtgaagcatattgcctggctggcagaacaggcaaaactagatggtggaagacagcaatggagacctgtcctcatggctgtgactgagaaggatttgctgctctatgactgtatgccgtggacaagagatgcctgggcgtcaccatgccacagctacccacttgttgccaccaggttggttcattctggctccggatgtcgatccccctcccttggatctgaccttacatttgctaccaggacaggctctcgacagggcattgagatgcatctcttcagggtggagacacatcgggatctgtcatcctggaccaggatacttgttcagggttgccatgctgctgctgagctgatcaaggaagtctctctaggctgcatgttaaatggccaagaggtgaggcttactattcactatgaaaatgggttcaccatctcaagggaaaatggaggctccagcagcatattgtaccgctacccctttgaaaggctgaagatgtctgctgatgatggcatccgaaatctatacttggattttggtggtcccgagggagaactgaccatggacctgcactcttgtccgaagccgattgtatttgtgttgcacacgtttttatcggccaaagtcactcgtatgggactgcttgtatgagcaacaaaaaatcagaaaagagccttgactgtcacaagaaatatttccacctccaaa

SEQ ID NO: 58584 - DNA, 549 bp, Homo Sapiens
  misc_feature (466)..(466): n is a, c, g, or t
  misc_feature (526)..(526): n is a, c, g, or t
aaataagcatttaattaggatttcattagtatttaatattgctttttcaattccaaaaagttaaattttcactttttagcagatattttaaagtacaatattaagtttatacaaaatgagcaattaagcaaacaccattatttcacattcttcaaaaatacaaattcatatttattcttttttgggtttggaggtttcttcctttggaagtactgaacctgtaacgttttcacatcgctcagtggaagtccgttgttcccatgtttcacacttacttttacataatccaaataaaactatttgggattttaaaagttgtcaccaagaccccggccaatgattagtgtatgtcaaaaaaaagggctcttgggggctcttgcctttcctggctagaagatctgagccagaaattcagcaaaaatctgtttccagccaccctccccaaatagggactagaaagagttcncaggaaaaggggacagacaccttggaactctgacccccaccccccacattctcccaaacnccacgagggatgtagactgttga

SEQ ID NO: 58585 - DNA, 553 bp, Homo Sapiens
acttccatatctaatacgttcccttggtctaactttcgtttttgtttgaagctaactgatttgagtttcaattttatcttttctggtgataatgactgtcccaaagaactatgcttcttatacacatctttatttggcaaaaaaagctgtttttgtttttagtggacgtgagttctgtgttacatgtttcttctgtcgggtttcctgagaagcttgttcataagatgctgtcattttattactggagtgaaaggttaccctcgtgaaacctcaatttttttcttttgtgattttgcaagggatttagtttatcacatttagatgaaaactgaccagcaactaattcttgttctgtccttggtaagcttttatgttttgttttgggtgtatcttttctactgtcgtcttgtagttcaggaaaatgacttttcccatctggaggagtctttggattatttacaaggctcttaaattgaacaacagtgacatctctatcagaagttctctctccttgtttacaactgttggtatccaaaggagaacactgctcttt

SEQ ID NO: 58586 - DNA, 555 bp, Homo Sapiens
  misc_feature (488)..(488): n is a, c, g, or t
  misc_feature (498)..(498): n is a, c, g, or t
  misc_feature (547)..(547): n is a, c, g, or t
gcaagtttatgaatagtttattacatttcagtaagtgtattgtgaatcaataaagcaaaagttaaggacaatgagctcattaccaagccagttattgattctctggttccaaaatagaacagtacaggaagggtatagagaaaataggatttttcatgataaaaattttaagcatcttaggaacacagacctaaagaaactataagacacaacggaaatttcagcagctacttaggatgtttatttatttacctttttttgccaattagaattagttatttggtttttactcttaaaaaaaaaagtattttcaactcaagtcagaggagtttgccaaaactgaatattacctcttactgacttaattattctttcaatttcttgtatatcttcctctcttgcctttgaaaagtttaccttactagctatctatcttatatcactgtcgtagctcagactgccctaacaaaataccataggactggggnggtttaaccnccggaaattaatttcctcacagtctggggattagaagtcaactcaaggngtaagctg

SEQ ID NO: 58587 - DNA, 670 bp, Homo Sapiens
ttagtatttatgcttccattttattggttttaagaattaaactgccacctcagtagtcttaagagcaatataatgaaacatacatacatttaatttagacttatgtccatcatagcttcaaaggcttccctgaaataaggctgggattcacatctttttccgtaaggaaagaaacactaacagtaattttgttatccttctacccacccaccctcattcaaacaattgatgaattcaagtctaacacgatttaaaacttttgtctgctacaacattcatctgatatgcctccctgcataacatagatttcttaaacctaattgaaaataaatcattttttaaaaactctacaagggttctcttaattcaaaattttatcatgatactgattttctcgtccaatacataggctaagtggtttcttaccacattcaactctagtgactttcaataaaagcaggatagctcttcataaatagttgagaagctctaaagtgattttggctattttcttattacatggaacaaagaatggtttggatttttaacagtaatattttaatagctcctaaacagggggatgaaaaggaatcaagtttgcaccagtccaagtacctacagtaatatgatagaagcactcaccaccatttcacactatcactcccatgct

SEQ ID NO: 58588 - DNA, 599 bp, Homo Sapiens
ttgtttcaataaggaatatttattaagaagacatgttaacatgcttagatacaaagtaaaaacacatgccaatctcagtgaactataaagaaaaaaataagaacaaaattgttttcagagaaatttttgtgttttataggcatcacatgtccatttgcatactagaaaattattagcattgataaacttttttttttcagtcttaaagtctttttaaagtaactttttggaaaatgtgaagttcacaatacaaaatttgcattgaagtctgaatgtaaattatagacttctccaagtgtttgagaatagaaatgtgattgaagatttgcattcccagatgctgcctacagcagtttcctttcaagaaatcaaatgttcttcattatcacatgataaggataagtttttggaggaaaatttttagggcacattaattcttggagagtactataatttttagttaatatgagcaagtaaatctttatgtcaatcaccaaaaatttagcttttccaaagaatatttcttcatgcctgaaaataaaattctatcaagtctatgtatttctataattagatgtataagtctaataagatcatct

SEQ ID NO: 58589 - DNA, 2303 bp, Homo Sapiens
cccggcgtcccgtcgagcccagccccgccgggggcgctcctcgccgcccgcacgccctccccagccatgtcgtccatcctgcctttcactcccccgatcgtgaagcgcctgctgggctggaagaagggcgagcagaacgggcaggaggagaaatggtgcgagaaggcggtcaagagcctggtcaagaaactcaagaagacggggcagctggacgagctggagaaggccatcaccacgcagaacgtcaacaccaagtgcatcaccatccccaggtccctggatggccggttgcaggtgtcccatcggaaggggctccctcatgtcatctactgccgcctgtggcgatggccagacctgcacagccaccacgagctgcgggccatggagctgtgtgagttcgccttcaatatgaagaaggacgaggtctgcgtgaatccctaccactaccagagagtagagacaccagttctacctcctgtgttggtgccacgccacacagagatcccggccgagttccccccactggacgactacagccattccatccccgaaaacactaacttccccgcaggcatcgagccccagagcaatattccagagaccccaccccctggctacctgagtgaagatggagaaaccagtgaccaccagatgaaccacagcatggacgcaggttctccaaacctatccccgaatccgatgtccccagcacataataacttggacctgcagccagttacctactgcgagccggccttctggtgctccatctcctactacgagctgaaccagcgcgtcggggagacattccacgcctcgcagccatccatgactgtggatggcttcaccgacccctccaattcggagcgcttctgcctagggctgctctccaatgtcaacaggaatgcagcagtggagctgacacggagacacatcggaagaggcgtgcggctctactacatcggaggggaggtcttcgcagagtgcctcagtgacagcgctatttttgtccagtctcccaactgtaaccagcgctatggctggcacccggccaccgtctgcaagatcccaccaggatgcaacctgaagatcttcaacaaccaggagttcgctgccctcctggcccagtcggtcaaccagggctttgaggctgtctaccagttgacccgaatgtgcaccatccgcatgagcttcgtcaaaggctggggagcggagtacaggagacagactgtgaccagtaccccctgctggattgagctgcacctgaatgggcctttgcagtggcttgacaaggtcctcacccagatgggctccccaagcatccgctgttccagtgtgtcttagagacatcaagtatggtaggggagggcaggcttggggaaaatggccatacaggaggtggagaaaattggaactctactcaacccattgttgtcaaggaagaagaaatctttctccctcaactgaaggggtgcacccacctgttttctgaaacacacgagcaaacccagaggtggatgttatgaacagctgtgtctgccaaacacatttaccctttggccccactttgaagggcaagaaatggcgtctgctctggtggcttaagtgagcagaacaggtagtattacaccaccggcaccctccccccagactctttttttgagtgacagctttctgggatgtcacagtccaaccagaaacgcccctctgtctaggactgcagtgtggagttcaccttggaagggcgttctaggtaggaagagcccgcacgatgcagacctcatgcccagctctctgacgcttgtgacagtgcctcttccagtgaacattcccagcccagccccgccccgttgtgagctggatagacttgggatggggagggagggagttttgtctgtctccctcccctctcagaacatactgattgggaggtgcgtgttcagcagaacctgcacacaggacagcgggaaaaatcgatgagcgccacctctttaaaaactcacttacgttgtcctttttcactttgaaaagttggaaggactgctgaggcccagtgcatatgcaatgtatagtgtctattatcacattaatctcaaagagattcgaatgacggtaagtgttctcatgaagcaggaggcccttgtcgtgggatggcatttggtctcaggcagcaccacactgggtgcgtctccagtcatctgtaagagcttgctccagattctgatgcatacggctatattggtttatgtagtcagttgcattcattaaatcaactttatcatatgctcaaaaaaaaaaaaaag

SEQ ID NO: 58590 - DNA, 506 bp, Homo Sapiens
ttacttgatatcaaattgacatttatttaaaaaagggaaaaaaaagacgtagaacagaattcacacagacctttgttattccaagctcctatttatgaatggtgattaatagcaataattctgtctctcttctctctgtgaaatgctaacacttgctaaaggcactcagattctgggcttaacggagacaaggtcacatgggaccataagccagtacgttttttggtagctacccagaaaggaagtttacaaatgttcctcccattcataacgggaagaaaaagtcaaacagctatcagtagaagcgttttatgagaagctatttacacagctatttgtccattcagccagagtgacagtaactgctcacaatggtaggggttctcccctgccaagaaagcaaaaacaataacaaaacactttttatcatatatgaaactcctgtacaatgatttgggctagaagaaaaaaatagttggtaaggtcaaatttgttttaaaacatct

SEQ ID NO: 58591 - DNA, 4506 bp, Homo Sapiens; identical to SEQ ID NO: 22426

SEQ ID NO: 58592 - DNA, 1750 bp, Homo Sapiens
ctcttgctaaataaatgtattaaaagatattttcataatgccaaccaacatggtggttcagtgacgatgagaaaaagtgaagcagttttaagcttgaatatagtttgggccctccaaggcactgcagcatgagtataaatgctataaacctttaaaaaacatgatttgaaagttttttgttttgttttgtttgtttttaaagagatgggggtcttactgcgttgtccaggctggagtgcagtggcttttcacgggtgcaatcattgtgcactcactgcagcctagaacttcctggtctcgagccatcctctagcctcagccacacaagtagctgggactacaagtgcaactggcacctgtctcctgaatattgagcttttaattttttgtttcggtcactcttgatagcagacattgactgaagcaaaaaattaaaagctttatattcaaaatttgcaaaatgaagctgggtgtggtggtgcacgcctgtagtcccagctgcttgggaggctgaggctggaggattgcttgaggtcaagtattggaggctgcagtgtaccatgatggtgcctataggaatggctactgcactccaacctggacaacgttatcaagaccccatctcttagaaaaatgcaaaattaaatgcaaaagaaatgggctgggcatagtgattcatgcctgtaatctcagtaccctgggaggctgaggtggaaggattgcttgagtgcaggagttcaagaccagtctaggcaacatagtgagaccctgcctgtaaaaaaaaataataaaaatagttggatatggtggcatgtgtctgtagtcccagccactctggaggctaaggtgggaggatcagtagagcccaggaggtcaaggctgcagtgggccatgatcatgtcactgctctccaacctgggcgacatccagaccctgtctcaaagaaaaaagcagaagaaaaatgttcagacagggttttgtaaaggtttgtagcatttatatttctacaagtatcaaagcttaaaattacactgaacttttggaataccttgtatctccataaaatgccctctttttaaaagtagttacccgcagagctgtgctctatatgctttgattaccgcagtttctttaaaggaagattttgaagagcagtgttaattaacatgtaataaaaggaattggaccctaattatagaaggtgatatgaacagctgttttatcatcctacatgctaccaagctgtaggtgtcccattaagtcctgctatttaagaaatacttacataacccttaggaactcttcaggctttaaaaggcaaggagcaaataattttaggagaccgataatgtcacctaaatttgaaatactaagaagaggttagtgttctcaactatgtgaaatctgtttctcctactttctcaaatctaatcctaggaatcttgcttataaacaaagcatttctgggacaggagtacttcctctattatagcaatgcttcacatcatattgtgctgcagtttccatcatttttaaaggacagagacataaatgataaataatggtatacaaatattacaatctaccacctcaaaaaaacaaatattgtttatggaattcagagtttggagattcaagtattgattgcagttttattttgaaaagaatgctacaatttatgtggtttttatttctcatgtttatattaaaagctaataaactctattttaattaaaaaaaaaaaaaaaaa

SEQ ID NO: 58593 - DNA, 399 bp, Homo Sapiens
ggactgaaccttggcggtggcccttcccggctgcggagagcccgccccacagatgtatttattgtacaaaccatgtgagcccggccggcccatccaggccatctcacgtgtacataatcagagccacaataaattctatttcacaccccttgtgccgggctcagtctagcccctgggaggcggctggggtctggcgccgccctgcgcagcccgcgcccacgtcagacgtgaacatcaatttgcttcgaaagccaagggtaaagaggcacgatctgatttatcagtttctaggaaacaccctccttgcaaatctccgacccgaacaacatgcactcgtcgatgtcacggtgggctgggatgccgtagttgacgatgttgttgtcctgggtgtagcccttt

SEQ ID NO: 58594 - DNA, 723 bp, Homo Sapiens
ttttactggctgtttgaattatgaatttatttacaacttgcctagattataataaatgattactgttctattatacaaacataacagtaaatgttttttaaatacaaagactgcaaatgaatacatgaaaaaattacacacatgtacaatatttataatttataaatgcaaagttaagacctctttaaattattgcacttgcgcattttacaaagatttttgtcatacatataaaatcattttttaaaatttactaacatcaactatgataaagttagatactgttaacttgaaattctttctccttccaatagagagcctattaaaattctggacacaggttcattgactctacaaatcagttcttcatgagcattgtatttgtgatggcatataacctgtgttactctccagtagtttttgtcagcaagattatcaacagcaaactcttagatgccttagctacgttatggatctaggatctcttttgttcatttgttcatgtaaagaaaaccatcttgtcttctcagaaagaatgaagatgctgcatttgtacaaattttggtaactatttcacagtgtgttgggcaagcatgtaatttcaaataggtaggggcattgtatagaaacaccttctctgggtaaatctttacactctgaacttgcacaccaaatgaacacatagcatatacaccatacaacagatcatatgggaaattatat

SEQ ID NO: 58595 - DNA, 523 bp, Homo Sapiens
tgtacaaacatgcatttatttttacagtttttgtggaaagaggcaaaacacatttaatcaaaaacatcaaacaccacatttgaaaaaagacttatctattatgtataaaggaaaatatccaagacaatttctttaaaatatatacaattctaacatagttatgcaatatatacattcatattttgacttaatctgccaaaataaacaggtacatatgaaactttatttacataatggctacagtttcagtctttagagttcaaagaaatagttaagattttcacctatttcatacttttcccccatgtttctcattcacctctagaggtttaaattaacctttcaaattgattaaaatgggtatgcctgaatgtacacaaaagggcattgttttatgtgtgcaaattgaaatattaaagatggatcagggatctcagtttaaggaatcctgccttctgtatgatgatgtcttaatttttgagatttcatatattgggttatagctatatatcaggacaggtaa

SEQ ID NO: 58596 - DNA, 1461 bp, Homo Sapiens
tttaaggcgccgggtttccggggctcctggccccgcttattccgcgggggtcggcggggtcggcctgggcgcccgcgccgccgctgcgctttgtccgctgggcacactgcttctgggaggggcgggcagacatggtggcggccgccgccccctcctcggccctagcatgccgcggccgcctcgcggctacccggcttgccggtcccgagcggcagccccggggtggcgatggggtcgcgccgaggcagcggaggttctgcgggcgactggaggttggcagtgggcgggagaaagaggaaggcaggcgcggctgggcctcggcctctggcgccgcggtaccctttgtctcggcagcctgacggccccgccgggctctccggagaggggaacgggcggcgagggtggcgggtcctgggcgccctgtgctgcggggccgagaggcgctcgggtcgcggcgggaccggccggaccagacagggttaatggaagagcctggccagtcccgcgcggggcccccgcagcgacagccttggccgcggggactggagtcctgagggggagaagcctgccgttctgaaggctcgggacttctgccccaaagacttcgccgccgagaactgcgggtgcactgcctcagggaagaagttgagaattttgccaggtcatctctgccagggcacagttcatcactgtgtgtttagtgtgtttcggtgaagctctccaagtgtgttgaatcagcgtgcctagcctcaagggtgcatcgtgaaaactgaaaccaaaggaatgatacaggcctgctttgtgtgtgtcttcccactttaagcttgttttcagtacaaatactcttgctttaaacctgattggactgtggcgagcggacatctgttcaaaggaggggccgagaccacagtacttctgaagggggcttgataatgtggaaacattttaagttttctctccggactgttttgctctctcaattcaggcaagttactgaagtacgttttttatctagaaaaaggtttgatgtagtctgtaaatggtccttgtaaagtacattgccatctcagaattaaaagatccactctcatttattatgcagaagttagtggtcattctttcctgtagatagtttatctcatgtaaagacccacccagcttggtttaaatttttttctcactgacgtataaccatcagctttgatacttccattttcaggctcagactttgaatttaaggaaactaaagatgactttattttcttttctcttggtttttttttccaaaaacaaaaaataaatccattacatgttaacatagatgataagagtgacatcttgcatttttgcaaatctttttaatgcctggtttaatagaagattctcagatctacgtcagactgttgtggttagcacaccatgtaacctctggaacactccactgtacactcatactttttt

SEQ ID NO: 58597 - DNA, 483 bp, Homo Sapiens
tttttttttttcagaaagctaacgcactgtttatttgggggattggggggaagcaccgtgccgctgctcactggtagccagccagctgcagaatggtggggtagcaagtacgatgggccatgcacttctggcggtcgatgaagacactgttggtcatggcggtgacgtccttctccaggctcatgtggatgtccttgaggttgcgcagggactgctccgcttgtagaagcttctcccgcagcgctgtgatggacttgtacagctcctccacctcactcaccagcttgggggtgttggggggtgtgagctggggctgaactgggctgcatcgcggcacagctgcatgttgggccggtgtgagagcagctacagccgggtctgggctatgtgcagaggttcctccttgtccttgatgggctccttcagtgccaccacgttgtgttcccgatctgtgatttccccgcagatcttgttcaagtgggt

SEQ ID NO: 58598 - DNA, 3941 bp, Homo Sapiens
cctgcctgcccgcctgcttgctctctggctgtgctcctgcttaaagaaatcagtccttcctttccgacttagtcctcgggaagaagtttcagactacaaggtatcattggaacatttcaagatcatcaaatcaaattccacagggattggtgaccaaccagaaggctcagacatctgattgctgacctgtccagacatcatctggtctccctgaacctgaaatcacaccatggatgattttgagcgtcgcagagaacttagaaggcaaaagagggaggagatgcgactcgaagcagaaagaatcgcctaccagaggaatgacgatgatgaagaggaggcagcccgggaacggcgccgccgagcccgacaggaacggctgcggcagaagcaggaggaagaatccttgggacaggtgaccgaccaggtggaggtgaatgcccagaacagtgtgcctgacgaggaggccaagacaaccaccacaaacactcaagtggaaggggatgatgaggccgcattcctggagcgcctggctcggcgtgaggaaagacgccaaaaacgccttcaggaggctctggagcggcagaaggagttcgacccaacaataacagatgcaagtctgtcgctcccaagcagaagaatgcaaaatgacacagcagaaaatgaaactaccgagaaggaagaaaaaagtgaaagtcgccaagaaagatacgagatagaggaaacagaaacagtcaccaagtcctaccagaagaatgattggagggatgctgaagaaaacaagaaagaagacaaggaaaaggaggaggaggaagaggagaagccaaagcgagggagcattggagaaaatcagatcaaagatgaaaagattaaaaaggacaaagaacccaaagaagaagttaagagcttcatggatcgaaagaagggatttacagaagttaagtcgcagaatggagaattcatgacccacaaacttaaacatactgagaatactttcagccgccctggagggagggccagcgtggacaccaaggaggctgagggcgccccccaggtggaagccggcaaaaggctggaggagcttcgtcgtcgtcgcggggagaccgagagcgaagagttcgagaagctcaaacagaagcagcaggaggcggctttggagctggaggaactcaagaaaaagagggaggagagaaggaaggtcctggaggaggaagagcagaggaggaagcaggaggaagccgatcgaaaactcagagaggaggaagagaagaggaggctaaaggaagagattgaaaggcgaagagcagaagctgctgagaaacgccagaagatgccagaagatggcttgtcagatgacaagaaaccattcaagtgtttcactcctaaaggttcatctctcaagatagaagagcgagcagaatttttgaataagtctgtgcagaaaagcagtggtgtcaaatcgacccatcaagcagcaatagtctccaagattgacagcagactggagcagtataccagtgcaattgagggaacaaaaagcgcaaaacctacaaagccggcagcctcggatcttcctgttcctgctgaaggtgtacgcaacatcaagagtatgtgggagaaagggaatgtgttttcatcccccactgcagcaggcacaccaaataaggtgagcatctgatttttgtctcttaagtgtagaggggcatatttttttgcatgtcgattttgatttaggaatcacactagtaaataataaaagcagtgaagaaggtgcaatttgtactttgttttgcaatgaccacaaaagcaagctcagagagaatgtgtttgtgaggttgcatgaggtactaagcccgggccatcttactccaaataaagtgcctgggctgaaatgtccacccttggagttggagtggggtgagttaccagggaaagaaaaccagataacatattctgtaaatatcaagtgttaaggtttatggttatgtgaaatcatacttaatgatattttgaatttgctttgaaaattccttcccaggtaaagtttacttcattctttaatattttggatgattgcccctttgtaggaaactgctggcttgaaggtaggggtttctagccgcatcaatgaatggctaactaaaaccccagatggaaacaagtcacctgctcccaaaccttctgtaagtacctttaggtttttctgagtttctttgatctcccagcttctaccagcagaagaaaacaagcagttggtctgtttacctaggaatggcagtgcccctgttctttgctttccctgatgaatagcaaacaggaaagtgttcagatttacaacagttctaagaagctgcatctcagttactcagagggtaaaatggaaccaaataatcacctctacaccctaactgagaggaggaatcagctagaatactgaggcagttcaaatttagatcctttactcgtctatttgtttagcttctattctataaattctggatagaaatttgaaaatgaaaggtcacatcattttggctacttctttgtcaagagcacccctaaacttattcccaaaagaatatgtatgttgcctattgggaacccatatgttccaatttgcctcatttttataacttggcacaaaaatgcagttattgggtagctgttgaaataattggtctaattgtgttgtcagcacctcctgaggaaagtcataaaactggaaactagaaaaactggttatgaatgatgtttttgagaatctaaaattttcttaatttattaagtgcagctatcttactaaaaagtacatttcttttcacctttttgttgaatgtatacgacaattgcttgcatttgtcattataataagaaaacgtatcaagctccccactgtatattgctgagctttccctgttaagtttgcttttatagctttgttggtgcccaagggagctgagagtccactgtcataatcctacattctagaggaagaagaaaaagtttccaatcctaggcctctgtgcatttaattgcatccattggctccatgccatttaattgcatttgttggctccatatataatctccaaagtcattaaattttgtcactttccaatttaaaaaggaagaaatggaaatgttcacaaatccttcttgggcacaactccttgaaccgtttaattaatctacaccccgagattctttgcataaaggctcacaggaggtatacactaatgtcaacccaatttacaattggaaaatctttatacattgaaaaaagcaacttttcctccccctctcaataggtacaagaatgcgggtttataaaaggacacagttgaggcaagagaccggacccaaaagttatgtgctctttagtgcctcaagttttccaagcatctctggtaacataaggagtagaaattattttcaaaaacaaaataatcactggttccagaccagtgattattaaccctttttgaattatgaacccctttaaaacctaatgaaatttaaggaccctctcccccaaaatatacatataaaaaaacaaggcagtctatggacctactgagtaactctcaagatagtaagtaaggagagaaagatctatgtttccctctttgataagtatgaaatatttggaggagatgctaatttttgcacgtttatgatatttgcaatctttcatttttgtagcagattatactcaaaaatttgatccagaacttggcccctattcttttatcagcactttaacttgtaaactgaaaagtttaccatcatctgtatgacatcctaatgaggttaaaaagataaaatgcagttatgattatgataggtataactgtatccaggtttccacagcaaaaacaaaacaaaacatacaccatgttctggggttattgacagcctcctaaaaaaaaaaaaaaaaaaaaaaa

SEQ ID NO: 58599 - DNA, 2753 bp, Homo Sapiens
gcgccatggagcagtggcgacagtgcggccgctggctcatcgattgcaaggtcctgccgcccaaccaccgggtggtgtggccctcggccgtggtcttcgacctggcgcaggcgctgcgcgacggggtccttctgtgccagctgctgcacaacctctcccccggctccatcgacctcaaggacatcaacttccggccgcagatgtcccagtttctgtgtttgaagaacatacgcaccttcctgaaagtctgccacgataaatttggattaaggaacagcgagctgtttgacccctttgacctcttcgatgtgcgagactttggaaaggtcatctccgcggtgtcgaggctctccctgcacagcatcgcgcagaacaaagggatcaggccttttccctcagaggagaccacagagaatgacgatgacgtctaccgcagcctggaggagctggccgacgagcatgacctgggggaggacatctacgactgcgtcccgtgtgaggatggaggggacgacatctacgaggacatcatcaaggtggaggtgcagcagcccatgattagatacatgcagaaaatgggcatgactgaagatgacaagaggaactgctgcctgctggagatccaggagaccgaggccaagtactaccgcaccctggaggacattgagaagaactacatgagccccctgcggctggtgctgagcccggcggacatggcagctgtcttcattaacctggaggacctgatcaaggtgcatcacagcttcctgagggccatcgacgtgtccgtgatggtggggggcagcacgctggccaaggtcttcctcgatttcaaggaaaggctcctgatctacggggagtactgcagccacatggagcacgcccagaacacactgaaccagctcctggccagccgggaggacttcaggcagaaagtcgaggagtgcacactgaaggtccaggatggaaaatttaagctgcaagacctgctggtggtccccatgcagagggtgctcaaataccacctgctcttgaaggagcttctgagccattctgcggaacggcctgagaggcagcagctcaaagaagcactggaagccatgcaggacttggcgatgtacatcaatgaagttaaacgggacaaggagaccttgaggaaaatcagcgaatttcagagttctatagaaaatttgcaagtgaaactggaggaatttggaagaccaaagattgacggggaactgaaagtccggtccatagtcaaccacaccaagcaggacaggtacttgttcctgtttgacaaggtggtcatcgtctgcaagcggaagggctacagctacgagctcaaggagatcatcgagctgctgttccacaagatgaccgacgaccccatgaacaacaaggacgtcaagaagtctcacgggaaaatgtggtcctacggcttctacctaattcaccttcaaggaaagcagggcttccagtttttctgcaaaacagaagatatgaagaggaagtggatggagcagtttgagatggccatgtcaaacatcaagccagacaaagccaatgccaaccaccacagtttccagatgtacacgtttgacaagaccaccaactgcaaagcctgcaaaatgttcctcaggggcaccttctaccagggatacatgtgtaccaagtgtggcgtcggggcacacaaggagtgcctggaagtgatacctccctgcaagttcacttctcctgcagatctggacgcctccggagcgggaccaggtcccaagatggtggccgtgcagaattaccatggcaacccagcccctcccgggaagcctgtgctgaccttccagaccggcgacgtgcttgagctgctgaggggcgaccctgagtctccgtggtgggagggtcgtctggtacaaaccaggaagtcagggtatttccccagctcatctgtgaagccctgccctgtggatggaaggccgcccatcagccggccgccatcccgggagatcgactacactgcatacccctggtttgcaggtaacatggagaggcagcagacggacaacctgctcaagtcccacgccagcgggacctacctgatcagggagcggcctgccgaggctgagcgctttgcaataagcatcaagttcaatgatgaggtgaagcacatcaaggtggtggagaaggacaactggatccacatcacagaggccaagaaattcgacagcctcctggagttggtggagtactaccagtgccactcactgaaggagagcttcaagcagctggacaccacactcaagtacccctacaagtcccgggaacgttcggcctccagagcctccagccggtccccagcttcctgtgcttcctacaacttttcttttctcagtcctcagggcctcagctttgcttctcagggcccctccgctcccttctggtcagtgttcacgccccgcgtcatcggcacagctgtggccaggtataactttgccgcccgagatatgagggagctttcgctgcgggagggtgacgtggtgaggatctacagccgcatcggcggagaccagggctggtggaagggcgagaccaacggacggattggctggtttccttcaacgtacgtagaagaggagggcatccagtgacggcaggaacgtggacaagactcgcagattttcttgggagagtcactccagccctgaagtctgtctctagctcctctgtgactcagaggggaaataccaacctcccagtct

SEQ ID NO: 58600 - DNA, 479 bp, Homo Sapiens
ttttttttttttttttaagcacatagctacatatttattaaacaggaaaacatatatagagaaatttaccctcaataatcaaaaaatatacattcttttcaagtacaactggaagcattcactaaattaactatgtactaggccacaaagatgcaacaatatactccaaaaagttaatatcatgcaaatcatgttctctgacaataatccaatatagaaagaaagcaatgatacaattttaaaagaatataccagcaaactaaatatctaagaaaaccttcagttaaaaggaaatcatgaaagaagttaaaaaacacaaaattaaataacaatgaaaacagtaccagtcaaaacttatgagaaaagtctaataaagcatttagggaaaaaattatatctttaaatatcttattacagaataaacatcgaaagcaaatcaagcatttaagatgttgcttattttatagcaaacacaaatt

SEQ ID NO: 58601 - DNA, 620 bp, Homo Sapiens
  misc_feature (534)..(534): n is a, c, g, or t
agagtttaaaaaactttcttttttttttctctcaaagcaaatagttccataaaacactaggtcaaagggcctcagtgtgtgtgtactgagtttgaagggccaagcaataatctataagagtgacctattagcaatatatttgcaaaactaaaccaaaatctgtacaggatattatcaaagccttaggaacaacagaacatacatattttatggagtggttggagaaccatctcccctttagtagttaacgtactgatgagtgtccccattttcataagcaaggacatactaacactaagcagttgaaaggcctgtctcagaagcatcctgccccaggtagctgatcacggtggccccataccacgacacagcttttcttttggttggtcttgctgagtgccttctctagatttgggctgtcattcaagcctcttcatttacaatgttcattaaaaattcagtaccatacctgtcccactcccaaccattttttaattcctgattcttttgtttgcctttgtgggtaaaatgcanatgtgtccaaggtgaaaaagcaaacccaatcaacctttgagtttttttttccccggccaggaatgtgacattgaacaaaggtccac

SEQ ID NO: 58602 - DNA, 528 bp, Homo Sapiens
tttttttttttacttaagatggtagttctttaacatttcttataagccagatgtttttcattcaatttcggacattgccaacacacttttacaactgattcaagttatcttcaggcttggctttagtttgaatgttccctttcaagctcctcaatactcctctgttctttacttttaccccaatgtactccaataatcacgcaatttatttattacaggcaatcatataccaatccttccttgcctttaaatagagaagcatcaagtcataccacttttgttaaataataaccaaagtttttttcaatattgtcttaaaagtagcatcttataatgcatacaaacatttttctaaagataaaagctttactaaacccatatccctgataataaaagtcagccagaaatctcctaaaattactcccaaatatatccaagtgtgcaagtacaaggttaatattattttgatgaattctgtattcattcaactgctaaatcacaggatacaagacctgggttgaacttttt

SEQ ID NO: 58603 - DNA, 600 bp, Homo Sapiens
tttttgcacaattataaaatgtttttatttcaattacataataacacgttttcctcaaattttattgaggttttggtctttttgcattcaattctatcttgtaacagtaatatgaatccacataatttcataaaatgtcaacaacattcataaggtacattcctttgtgattttatattttacaattttaaatctaactttacaattattttaaaaaatttttttatatagaaaacagatattttcttcaggcagatcaaaacaagaattttccagtaagaatatactgggacataacaaatgaaaatatttataccaaaataccaaaagtgattcagctctttaaaatatcctactatagtctaattagtagcttgtacaagaacaagtaaccattttttactgctcttttgaatgatgattagaaattcaaacaaagtattttaaggttcaaaaactttttttttttttttttttttttttagagacagtgtctcactctgtctcccaggctagagtacagtgtgcaatcatagctcactgcagccttgaactcctggcctcaagcaatccccccaccttggcttcccaatgtgctag

SEQ ID NO: 58604 - DNA, 581 bp, Homo Sapiens
aatcttttttttttttttttttttttttttaaaatggacttgaattttaatttttttaaagattatctatatatatattaataaaaagtgcaaagaatagaccttcatgtttaaattatattctaaataaaatatatatatatatgtatatatatttccattaactgcgggagacaactggcaagtaaagagcctgagagagtccagtccctctccaccactacaatggacatatatttcaaggaagcacctatgaaaaatagtagagtgttcacaacacatctggtaacacagatagcttctgggtgttcttgagagcagtttgtttgcattttcaatatgacatgaaatgaagggaaaaatcaaattcacaaaccgaaatgacattacttagaacaatctagtattctgtattcatgttttacatgccctagagcctagcattttcatgtagcaagctacactcacatgtgcgttaagccgcgtatctcaaatggtgatcagctcttagtgcaagtgctctctgctcctaccactgctggttgagtaacatagctggaacatctggttagaactgaatt

SEQ ID NO: 58605 - DNA, 1623 bp, Homo Sapiens
cggccgcgtagcccgcgcgcggagcgtaccctgctgcggccgttggccgttagcgcggcttcggcggttgtcttggagaagcaagatggcggcgacggcggccgcagtggtggccgaggaggacacggagctgcgggacctgctggtgcagacgctggagaacagcggggtcctgaaccgcatcaaggctgaactccgagcagctgtgtttttagcactagaggagcaagaaaaagtagagaacaaaactcctttagttaatgagagcctgaaaaagtttttaaataccaaagacggtcgtttagtggctagtcttgttgcagaatttcttcagttttttaaccttgactttactttggctgtttttcaacctgaaactagcacactgcaaggtctcgaaggtcgagagaatttagcccgagatttaggtataattgaagcagaaggtactgtgggtggacccttattattagaagtgatcaggcgctgtcaacagaaagaaaaagggccaaccactggggaaggtgcacttgatctatctgatgtacattctccaccaaagtcaccagagggaaaaacaagtgcacagacaacaccaagtaagataccaaggtataaaggacaaggtaagaagaagacaagcgggcagaaggctggtgacaagaaggccaatgatgaggccaatcagagtgatacaagtgtctccttgtcagaacccaagagcaaaagcagccttcacttactgtcccatgaaacaaaaattggatcttttctaagcaacagaactttagatggcaaagacaaagctggcctttgtccagatgaagatgatatggaaggagattctttctttgatgatcccattcctaagccagagaaaacttacggtttgaggaaggaacctaggaagcaagcaggaagtctggcctcgctctcggatgcaccccccttaaaaagtggactcagctccctggcgggagccccttctttaaaagactctgagagtaaaaggggaaatacagttttgaaagatctgaaattgatcagtgataaaattggatcacttggattaggaactggagaagatgatgactatgttgatgattttaatagtaccagccatcgctcagagaaaagtgagataagtattggtgaagagatagaagaagacctttctgtggaaatagatgacatcaataccagtgataagcttgatgacctcacacaagatctgactgtatcccagctcagtgatgttgcggattatctggaagatgttgcatagacacgaagaaggaagtattctaattaacaaggacagaggactgaccggttccatttttttttttttccagacaatcactcagctggaatgtctgctctctattggtgccttgcatttcaaaaacactgcagatattttttaaaagtaattttcattttactaaacaaaatacttcctatttgagcccatgtgtggaagatttaatattcttaatttaactgtacatttctttatggaaattgattatctacactcagtttcattacagggaaggaacccatgaaaacatcagtgttaagagcatgatgaaaggtgtcaataaagccgtaggatcgcgc

SEQ ID NO: 58606 - DNA, 477 bp, Homo Sapiens
  misc_feature (209)..(209): n is a, c, g, or t
gtttcaatccacaagtatttattggttctgacattccagacaacgtactgctcaaggcactgtgaggagagacagagaaacagatggtccctgccctcatgaagcttacaatttaaagacaaagacattctctcattgcagcataaccagcaattccaagtggtatgtggaaactgtgtagatgtggttgtgtctgttacaggattcanatgggggctggatgaggaggatctgaatgggccaagagagaggaaagagctgttccatgtaaaagcacagcacagaatgtcacaagatcaggaacactcacagcctgagcagtgagactagttaccagcctctgtgatggataaatggggctgaggtccaaaggctggttgaagcccactgttgaggctaatgactttgacctttatcctttggcagcagagagccaatgaaaggtatttgagatgctgagtggcatcatgaaagtga

SEQ ID NO: 58607 - DNA, 561 bp, Homo Sapiens
ttttttttacaatgcaaaaatgcaaagtttattttcttaaataaaatactatattcatatctatacaaataattattacaaccattaaaatgttacatttaacaataaaaatttccaaactttaaacaagaggatggttcagaatattcacaccctaatacaatgcatttgtaaaaagatgtcaaaataaacaggacctattcttatttacaactgtaggacaatcctgatcatattatacatatctgctctggattccattacaaaacaaattagtttccataagaattataaaccaggagatttacagtaataggacacagtgtgcagcagacactgctgccatggtaatagatacaaatattacactattgaaagcactaaaattagttttttttgggtgactgccctacagtaagcttctcacccagtgtatctataaataatttgtgaaggtaattatgttctcctcagatttttcaacttttttttaccaaagtgaaaatatatatatatatgtatatatatttatatagcctgctgaaagtggaagcgaatctt

SEQ ID NO: 58608 - DNA, 482 bp, Homo Sapiens
ttttcaaagcaaaacgtttaataattttttttggaaccccagtgtaacagaattcaaatgggaaaagtgagagggagtgtttaaacaaaggcatccccaagtcccttcccagttggtcctgaacaatggaggaggtcaaaccttcttttccacagcatgatggtataaatcagggaagtcctggaaatctattccacaccctaaaatacccaaacccattaaaagcacagatataggcttttacaaacatttactaaataagcaaaaccatacaaaatatgttcccgtcggcaatttttcccataccatggactcaaatggttaaaactccttatcacccagactaatgccaccttttcaattcccaataattccttccgtaacaagcatcattgctccaagaatctctcaactacattcaaacccgagtcttcagacccttggccctctgggacctccagagcctttgacagtgccaccca

SEQ ID NO: 58609 - DNA, 1472 bp, Homo Sapiens
cacttgttgattttgcagaaaagatagctgtgttacaacctgtcctaaggtcaggtatgaatacttgtgcttctttcttggctccccaagccagagggcattcctatgcccaggtgagagagcacggagtgttactttggcagcacagtcagttaccagaggtaggaaaagcaaaggccaggcaggacatgaggggcccttgcactggctggttctccctgccttcaccaccctccaggtgaatgactgggtgaataatgattgactgaggaggtaatgaataatttatggacactgctggacctcagtctcctcatctgaaagatgagtggttggagaagtttaatggttttcaaatgctttttttttcagtcttcaaataagtgtttacgtagaagcaccatatctgaaacaggtgacagtggaccagtctgaatgaaatgagggttggcaggcctgagctccaaaaccttctgattgcccaagccctccttgtcttgcttggattatctccacacaaatggagaaactggacaaggtggtcatggaggtccctgaaagctcaaagactttctcattccaggattccccatgttcatatgccagcatggcatgggggtgctctgtagtcaagcagggtcctttggggggcttagggatggagccaggaaatggctctgggactcagcgggtgtccagagtctcatcagcagggtttctttactttcactgagtggctggtgcctgcacactgagttttgcaggcttactctcacagagtgagcttcctgcaggccccccactgcaacccctttccttcctggagctgtgtgctgactggtgcgtgagcaccccaggccctctccccatgctgctgatggtcagctttctctgcacgctcgtggttgccacagtcaacgctgataaaattgctgatgcagattgcctgcccagctgcgagtgctggcacgggaccagcagcccagacggtcactggaagtggttgggctgattattggcatcatctccattgtcctactcggttcttaaaggcatatggacttgcctcactcctacagcaaatgacggcatgggcaaagaggggcaacagacccaccctgaagacactcctcatctggttgacttggcagggttaagggaaaaagatgtgatgactaggagctgagagcttagtggttctgccagagctgcagagtctttgttggcctcagggtgggacctctcacatctctgtcagcttttcacagacaccaacctgttatgattcatttcacctgtcctgagcactagcaagaaaaattcgctgtagcttgtgatgtattattctggatttctcaactcattcatttgttcattcattcactataccattactgtctattataaggggggcacaatggtaggtgctgggaataaaaacgatgtttaacgtttaaaaaaaaaaaaaaaaa

SEQ ID NO: 58610 - DNA, 561 bp, Homo Sapiens
acttttatgcattttccaagttttgctacaaagaactcgcattacttttatgaaaaaaaaaaacatgtcttttccctagttaacagtaatttccacggaggagtttcttatctgtttcaaaatatctacaaggaaatcagtaggaatatcatgcttagaaaatgtgaactgaaatgagaaacagaaaatatgcaaagatctgaaacacttctggtcccaagcatttcgataaggaatattcaagctgtatatagagtcttcatttttaatgaatttttatgatcaccattccaccataaatgacttagccagttccccatggtggacatggaggttctttccaaatttttacttttaaaatcaatagcataatgaaaaccatgtagcctgcacacatataaatatatatgtaggattcattcccagcaggtttggtgagacaaagggtttatgtatttgtaatttagtgactgataaactgcccttcatagaagatgtataagaaccttcccacaccccctttgagaactcaaggcttgttgagttccagttgattgcttc

SEQ ID NO: 58611 - DNA, 502 bp, Homo Sapiens
  misc_feature (362)..(362): n is a, c, g, or t
  misc_feature (498)..(498): n is a, c, g, or t
ttttttttaacaagcatggatagtattcatatgtaaaggtagtatcaatgagaaagagctggaagacagacctagctgtctgtcaggtagaatgagggtgaaggagatctaggatgcttcaggcattgcgcttgaacttaaaaaacaggatcagcaggccctgacttcataaggcccataaatacaaatgactagctccctttctcaaggtcattgaaaatatacagtagtttcagacatcacatgggtttgggcaaagggggcagatttccaagctaggtcacttaatggtatctcttgcctcaaaatagtcccatcaacactaatttaaattatttccacttttgttttaaagcttaagnattctactcactgaccattaatttgagctaacagcaatgtgtttgcttttaatgcagattctctttaggggggataaagggctatgtcctacctttaatataattgttaagcaattctacctgggtggttttttgngttt

SEQ ID NO: 58612 - DNA, 470 bp, Homo Sapiens
tatttaaaatgttctttttttatttgtcgtttaaaaacaaacttggaagaagcaaaatccaaaacttgccctttgcctctcgcaacataaatatgtacagttcagaatgatcgctgatacaaaacatgccaaggacaggggcgctgagggtggagggagagagggcgctttaaaaaagggaaccatttcatccgttgttacgaaggaccaaccttgctgtacaggatacacacaacacaaaataaagtcttcacgggattcacacttgtcagcgatttattttttaaaaagggggagggtcctggaggtgaggggagaagactgtaaaggggaaaactgaaaactgagtatgtgcgagtgtaaaccaacccaaaatacaaacacgggggcggggggtgggggttgggatctgatgcaattatacatgcagggtacttaaaaaaaaaaccaaccaaaattccaaccttgta

SEQ ID NO: 58613 - DNA, 506 bp, Homo Sapiens
cctcaacagctgggaattcaggcgccccaggagcatggtctgtgggcggcggccacaggtcccaggggagcgaaaggtcccagaacggggaggccggccccctccccgggttcacccccgcgcgaatcgcgttgcctggcgcccggaccctctcggctggaccccgggcccgcctgccgcagcgcccggcgccctcaggcctcccgctgacccttcccaagcccgacctcgacgccccccccttttttttttttttttttttttttttttttttttttaatcttttgcgaaatgttttatttactgcttaaaatctaggggggtggatatattcatgtatgcatatattgatagattaatacaaacataagtatgtatttaaatttaaggataagtaaagtgagagtacaacagccccattcttagttaaaaagaaaagaaaaagacaagagcaagccactgccaccacaggtaccagcacttaaatttgtcagcaggctgaccaa

SEQ ID NO: 58614 - DNA, 553 bp, Homo Sapiens
tttctggagaatatttgtgtttatagcaaagccgacttggaaatatgcaatggaatgcaaaatccacatggacttctaaggtaaataaaaaatattagaaaaaaaaaagttttgctttgggcaagctgctgctgggacggccatgggtgacttttctcagcgatgaggggcactttggtgggggcctgagggactccaggacagccagaaaaggctgtggtgtagggtgggtaatgcattaagagaggacggggcactcacgcctcacgctgagccctgcccagggtgcgatcgtggtggctctcacagccgtaggtgccctggtcggccagtatgacaccatggatgaagaggcggtggatgtgcccatcctgggccatggacaggcgagagtcgtggggcaggggctgcccacctcgcacccagcgcacggcccccgctgcacccactcggcctgtctccacttcgagacacacgtcctggccttcctctgcccgcacatcctgcaaccgccgtaggaacagcagctctgtctctcgaacatggagccggg

SEQ ID NO: 58615 - DNA, 905 bp, Homo Sapiens
tcctcagtccccagaaggctgatggtggatcctctggccatctcctgtggggtcttactgctcctctgccatttctctatgcctgaagacacgaagatgatatcaaggcagagctaccatatcgcagccagtctctaggctactgctgtgcagtggctcccactttctaatgctttttgttttgctttttctaacaaaacaatcttttttcaaaatgaattccaacccctgctagcttccttccccgcctccatactgttttaggcagcaccgtttatgtgacagagtccgtgtttctcaaatgcatggtgttcctcaggtggagagtgggcagaagttttgcaacactttttttttaagttattgggtgcaaaatcccaaaccaggatatgtgtatgtctgtgtgtttatgttttttatttgaccctcccctctttcaacctacccccttttatatctaatgtagaaaaagcgaaattgaatctggaaagcaaactgtggtatatagttgcggtaacaatcatgaagagagagccgggctgtcccctcagtaattcattttaaataacaaattatttaaaaataaaattcatgccagagccagctgaagaggccttccttcatcaccactgaggcacccccaatctggcctctgtccatctggcatgtctcctcccagcagattcatctgttcaatgccattgcgttccataaagtatctcctgtactgtccaaaaaaaaaaaaaaaaaaaaaaggggggcggaaaaatcccgaggggccagtaagcgaccccgttttggcaaggccccaaggggggaaaaaagagacggggcgtcaaaggcgggggaacggctgggcttggagagacctccgggggcaggggacccacagaaccggaaaaaag

SEQ ID NO: 58616 - DNA, 4740 bp, Homo Sapiens; identical to SEQ ID NO: 28801

SEQ ID NO: 58617 - DNA, 424 bp, Homo Sapiens
  misc_feature (143)..(143): n is a, c, g, or t
  misc_feature (145)..(145): n is a, c, g, or t
  misc_feature (395)..(395): n is a, c, g, or t
tcgacgtggaaacaaacaacaaaactgtacattttttttaaagtttgttgaaaagaatattgtcttattctataaaacatttcaaacctagttagagatttgtaatcaaaaaacatttgcgcagaaagcagcacttagggctncntgttctataccctacagtcagacaggaaaagaactgaaaatggcacccttctgacattctgaggcagctggactggcagccaagtaaaggagagtgatgaggtggtgtggggagggtggggaggcagcgcgagggtgctctccacagcaggtaggagcaggcaggagtggggacggagggagagcttgtgactgggacagtgaaaataaacgattggctcttatcaatcacttgcaccaactaaaaaggnggaaaaaaaaaaagtcgacgcggccggaa

SEQ ID NO: 58618 - DNA, 563 bp, Homo Sapiens
  misc_feature (545)..(546): n is a, c, g, or t
gattttaacagaaaaagtttattttaagaagacacaaacagctctagctatataaagaatacagttcaattgctggtagcaagccagtaaggaatgccttttttttttaaagaaagacaagaaaaaccctttgtaatatcaccccacagagggctcccttccattttgtgttggaatcctaaaaagactgagatcgtgatctctcctactttctgcttcttcttgaaatgttagggacacattcccagctctaggagatgtgtctttcctgtaccttccagtttagggtatggtctgtaaattcttgtctcccttatttttctaagtgcattgttggcattcagtaagcactaaatggtaagggctaacttaacaaaagtccacctcttgacttcatactaggactggccaatgctcattcctcagtttgcttttggcaagtgtagtatttttgctgcttttggatccaaggcacaagcctgggttcccttcctaattctgggaatcctaaacagaaggcataaaggaactgttcatggatgctnntaatagggaaatctgaa

SEQ ID NO: 58619 - DNA, 475 bp, Homo Sapiens
tcatattttatatgttttattcacaaattttataataccagtcacacatttcaaaaccatttattagagtcagaccactcaagttttacactagacagaaaccgtctctaaacaatatattggtggttgttgttaaagtggcctttaaaaaggggttcactctgctaaaaggaggctcatcctgataattgcaatcactaacaactagaaaaaactaaaccgtgagtacaagcttgaaaaataaaatgtagcactgggacgctattaaaactcattgtaactaagttgaacagtaactttacttaaatgacatatcgctcccatatgaatccacagaagaggaggactacagggaaatataaggtggcagaggaccacttctgtcaaggggtaaagaaaaacactccttcgctatcagggaagggagaaaaagagaaaaggaagaggaggagggactgaacttttcagagaaact

SEQ ID NO: 58620 - DNA, 534 bp, Homo Sapiens
ttttttttgctcaggtaataatttattaagtcaatttaaactaaacattactaccattgcaaaagcatttgctctgaaaagggactgaaaaatgcatcataaagttacatagttcagcaacaatatcaatattgattatataaagtaaaactactggcaaacgtcatttaagcttaccctgtaatttttaataactttataaggagcaaatgtgtcaccttaaaaatgtaccagtggcatttacaaattccttcaaactcatttacaaatacagtaataaaaattcctgagctcccttttcttacaccagtattcaccaatcaacatccatgcggtgttttatttgacccacatcctctttccttttcttaagaaaatattttatcacattcgtaaaagtatctgtgcttcaagtcagtttgtaagtatctgtttttaatgtgaacctgatgataacaagagacaaatgcttaacattagcaggggcagcaggaattgaggggtggtgtgggggacagtggaggagatgtaaat

SEQ ID NO: 58621 - DNA, 518 bp, Homo Sapiens
tatcttttcactgcttctttattatgatgcacccacagtacaaaacctctcacacatctgtgaaaggggaaggttacatttctttttggggagcaccttcatttttgtttctgttaccactttgaagaaagcaaatcatttccaaagaaaaacattttaaattccaagtgtttaagactcagcttgtattttgggggtttgaaaagggagtaccactgtttttcccccaaaggtggaagattgttttgtggcattttaagtttgatgtggatcagaagtcttcactgtctggttgaaccagtctataattttcatatgcaacttttcatatcaaaaatgtttcatttttacctctactcacaaagagatgctgtttaaaaaaacacacacacagctaaatttaaaaccgatcatgaaccacagcattactaacagggaaaatgaacttttgctgccctctcctgctaaaacaatgaaatactaaaataccaaaagatttatgaagctaaagcgaagtc

SEQ ID NO: 58622 - DNA, 1709 bp, Homo Sapiens
atatcaaggctgttttggttatgtatcaatattgtggtttatttgagctggaagtgattttttctgtgtatgtatatgtatacacttcaataggttttaattttgaagtgaatatttgccatgactccattttccccataccacttcagactttagcctgtttagttttaaggactgaaaatggtaggtttgggcagaagaatgaatttgaactttgatggggtttttttgtttttactttctatcttcataaccatttaaagcgatttagcttgaaattaaattttatcaggctaccaacatgttatttatttatttaataaacacatttattgaaaacctatactattgtattggcaccatacagggtattgtatttatactagtgagcagaccagggcatttccatcctcatggagttcatggtctaatgaaaatagctggggccgggtgtggtggctcacccctgtaatcccagcactttgggaggctgaggtgggaggattgtttgagcccaggagtttgagaccagccagggcaacatggcaaaaccccatgtgtacaaaagattaaaaaattagccagatgcagtggcacatggctggggtcccagctacccaggaggctgagttgggaggatcatctgagcctgggaggttgaagcttgcagtgagctatgattgccactgtactctatactccagcctgggtgacagagtgaaaccctgtctcaaaaaaaaagaggaaagaaaatagctaggagacaatcagagcagatcttgggcttctgtggctcatctcagccctttataactggcctgagaagagggtttatctacttgtgcaagtggcccagaaatctcactcgtacatgaggctttggaacatccttgcaaaggtacgctgaaagcaaattgctgttttcctggtggttctgcacgtttcctaacttttatcatagtttgattttcattatttaagaaaaaataaaaaatccaaagaccataagatggcattagattttttaccattaaattattaatgcctatttggtgctcataaagattaatcatgtcacgcatgtttccaatctttcttttgcagtatattattttctaaaaattgttacatgcaaatttaaaccaagatttatcagtaaaagaaaaaaatagaatccttaataatgtaaatgttgttatatatgctaccctggtgaaaatatttttataaatcatgttgtcatttatgctttatgtagcctatttttcaataacctttttttaaaagcaattttttttgacaccaagattgttgatttttaattaacaccagttggtggcactagaaacctgaaatttttcaaagatgaacaaagaaaaattgaaaaggtaatctaaacatggagaatttttaggaaaataaatgaaaaatataattgtatattagagatgtatttttcttctggaatggaattctttttctaaaatgcaagtcgctatccattttgactgcaatgatgaaacttgtttatcttccagaggacatatatatatgtgtgtgtgtgtgtattgtacagatacctttaatttgattacactgtttcttgtaaatatgtttctgtataaaatgaaacttttcaagaggattctatgtatatattgtacttattaaataggtaatgcctatttaccaaaaaaaaaaaaaaaaaa

SEQ ID NO: 58623 - DNA, 690 bp, Homo Sapiens
  misc_feature (540)..(540): n is a, c, g, or t
  misc_feature (580)..(580): n is a, c, g, or t
  misc_feature (594)..(595): n is a, c, g, or t
  misc_feature (605)..(605): n is a, c, g, or t
  misc_feature (690)..(690): n is a, c, g, or t
aaataatttactttattacaaagatagtatacaatttctagaaaatacatgcatgtacaaagattgaaataaaaaaaacactcataaatatccagatttaaatgtcagcatataccttcctgatctttttctatcatactgtatctatcaacatctaacctgcttttttaactataagtcatacattttgccatatcagtacacttttttctgtaacattatttttagagcatatcaaaccatagtttatttaaccaatccccaattaattcataattagaatatttcgtgtttttccagtataacagttctataatctttgattataacctttgtgtaaattcctataagtattgagtcaaaggagacacacatcttttcaggcattacatataaaataaatactaaactagactccaggaaagtggtatcaattcacattcccaatagcactgtcccaatggggctaatttatctcctttttaatctcagcgtatttccagttataacataccatttttacctcttgattcaacaatngtacttagaagaaagctctaaaatcccaaactgaagcttncctttaggaccctnnctattacaantccgtatgaaagtaccagatttcgagagtgacatcaggccaacggaggggagtgaactactgggctctctccctaccacatattn

SEQ ID NO: 58624 - DNA, 581 bp, Homo Sapiens
  misc_feature (491)..(491): n is a, c, g, or t
ttttttttcctctcttttaaagtctggttcagccccaatcacttggctgatgggggggaacacgggggcacgttggctggtggacatgggcatgcttcagagaaaagtgtctgaaacgaagacaggaatctgagaggcggctgcccaggcagatgacttctgagaacagagggtgtgtgtagcaatcctgctggctggagtggcatccggtggtgtgaagaatcagggggtctcttctggagagttgtgagagggacagagtctgtgctcttctctggcctttttgtttgttgtgtttttgctcaggaaaaagccaaggcaacaggaagagctgaagtctctttgtgcccatagcacagggattggggactccagccctgggctctccctggggacgaaccctcctcctctctgggctgctcagaaaccaaagcaaacttggcaagaaaagagaggggagggaaggagagagaaggtcaggaaggcacggngccagcagagccttccttttcaggacctgctgcaaattcaagaaccaggagaacatgtgacaactctaactcacagagcccttcaaacct

SEQ ID NO: 58625 - DNA, 389 bp, Homo Sapiens
agtactagcttcagaaggaaaagctttattttctcagagaaaagggtggtagattaaggaaatgacccagcatgttggtattttgttgttgttgttgtttaggtgtacatttaaatgcttatcaaaaaggaaacattgtcatgtcaaagaccactgcaggggaagcccagaggtggctgtaagaagcagatcacaagtcctttaacaagttctttcaaatagcagtagagctcagaggggggctgttgtttcaaacaagattcaattagcatcaagttattaaagggcagccggggaaacaagaataatattgacagacctgctttttaagcagtatcttttccctctaatcagctgagtttgttggagctgatcattttatttcttca

SEQ ID NO: 58626 - DNA, 4114 bp, Homo Sapiens
attaattctggctccacttgttgctcggcccaggttggggagaggacggagggtggccgcagcgggttcctgagtgaattacccaggagggactgagcacagcaccaactagagaggggtcagggggtgcgggactcgagcgagcaggaaggaggcagcgcctggcaccagggctttgactcaacagaattgagacacgtttgtaatcgctggcgtgccccgcgcacaggatcccagcgaaaatcagatttcctggtgaggttgcgtgggtggattaatttggaaaaagaaactgcctatatcttgccatcaaaaaactcacggaggagaagcgcagtcaatcaacagtaaacttaagagacccccgatgctcccctggtttaacttgtatgcttgaaaattatctgagagggaataaacatcttttccttcttccctctccagaagtccattggaatattaagcccaggagttgctttggggatggctggaagtgcaatgtcttccaagttcttcctagtggctttggccatatttttctccttcgcccaggttgtaattgaagccaattcttggtggtcgctaggtatgaataaccctgttcagatgtcagaagtatatattataggagcacagcctctctgcagccaactggcaggactttctcaaggacagaagaaactgtgccacttgtatcaggaccacatgcagtacatcggagaaggcgcgaagacaggcatcaaagaatgccagtatcaattccgacatcgacggtggaactgcagcactgtggataacacctctgtttttggcagggtgatgcagataggcagccgcgagacggccttcacatacgccgtgagcgcagcaggggtggtgaacgccatgagccgggcgtgccgcgagggcgagctgtccacctgcggctgcagccgcgccgcgcgccccaaggacctgccgcgggactggctctggggcggctgcggcgacaacatcgactatggctaccgctttgccaaggagttcgtggacgcccgcgagcgggagcgcatccacgccaagggctcctacgagagtgctcgcatcctcatgaacctgcacaacaacgaggccggccgcaggacggtgtacaacctggctgatgtggcctgcaagtgccatggggtgtccggctcatgtagcctgaagacatgctggctgcagctggcagacttccgcaaggtgggtgatgccctgaaggagaagtacgacagcgcggcggccatgcggctcaacagccggggcaagttggtacaggtcaacagccgcttcaactcgcccaccacacaagacctggtctacatcgaccccagccctgactactgcgtgcgcaatgagagcaccggctcgctgggcacgcagggccgcctgtgcaacaagacgtcggagggcatggatggctgcgagctcatgtgctgcggccgtgggtacgaccagttcaagaccgtgcagacggagcgctgccactgcaagttccactggtgctgctacgtcaagtgcaagaagtgcacggagatcgtggaccagtttgtgtgcaagtagtgggtgccacccagcactcagccccgctcccaggacccgcttatttatagaaagtacagtgattctggtttttggtttttagaaatattttttatttttccccaagaattgcaaccggaaccattttttttcctgttaccatctaagaactctgtggtttattattaatattataattattatttggcaataatgggggtgggaaccacgaaaaatatttattttgtggatctttgaaaaggtaatacaagacttcttttggatagtatagaatgaagggggaaataacacataccctaacttagctgtgtgggacatggtacacatccagaaggtaaagaaatacattttctttttctcaaatatgccatcatatgggatgggtaggttccagttgaaagagggtggtagaaatctattcacaattcagcttctatgaccaaaatgagttgtaaattctctggtgcaagataaaaggtcttgggaaaacaaaacaaaacaaaacaaacctcccttccccagcagggctgctagcttgctttctgcattttcaaaatgataatttacaatggaaggacaagaatgtcatattctcaaggaaaaaaggtatatcacatgtctcattctcctcaaatattccatttgcagacagaccgtcatattctaatagctcatgaaatttgggcagcagggaggaaagtccccagaaattaaaaaatttaaaactcttatgtcaagatgttgatttgaagctgttataagaattgggattccagatttgtaaaaagacccccaatgattctggacactagattttttgtttggggaggttggcttgaacataaatgaaatatcctgtattttcttagggatacttggttagtaaattataatagtagaaataatacatgaatcccattcacaggtttctcagcccaagcaacaaggtaattgcgtgccattcagcactgcaccagagcagacaacctatttgaggaaaaacagtgaaatccaccttcctcttcacactgagccctctctgattcctccgtgttgtgatgtgatgctggccacgtttccaaacggcagctccactgggtcccctttggttgtaggacaggaaatgaaacattaggagctctgcttggaaaacagttcactacttagggatttttgtttcctaaaacttttattttgaggagcagtagttttctatgttttaatgacagaacttggctaatggaattcacagaggtgttgcagcgtatcactgttatgatcctgtgtttagattatccactcatgcttctcctattgtactgcaggtgtaccttaaaactgttcccagtgtacttgaacagttgcatttataaggggggaaatgtggtttaatggtgcctgatatctcaaagtcttttgtacataacatatatatatatatacatatatataaatataaatataaatatatctcattgcagccagtgatttagatttacagcttactctggggttatctctctgtctagagcattgttgtccttcactgcagtccagttgggattattccaaaagttttttgagtcttgagcttgggctgtggccccgctgtgatcataccctgagcacgacgaagcaacctcgtttctgaggaagaagcttgagttctgactcactgaaatgcgtgttgggttgaagatatctttttttcttttctgcctcacccctttgtctccaacctccatttctgttcactttgtggagagggcattacttgttcgttatagacatggacgttaagagatattcaaaactcagaagcatcagcaatgtttctcttttcttagttcattctgcagaatggaaacccatgcctattagaaatgacagtacttattaattgagtccctaaggaatattcagcccactacatagatagctttttttttttttttttttttttaataaggacacctctttccaaacaggccatcaaatatgttcttatctcagacttacgttgttttaaaagtttggaaagatacacatcttttcatacccccccttaggaggttgggctttcatatcacctcagccaactgtggctcttaatttattgcataatgatatccacatcagccaactgtggctctttaatttattgcataatgatattcacatcccctcagttgcagtgaattgtgagcaaaagatcttgaaagcaaaaagcactaattagtttaaaatgtcacttttttggtttttattatacaaaaaccatgaagtactttttttatttgctaaatcagattgttcctttttagtgactcatgtttatgaagagagttgagtttaacaatcctagcttttaaaagaaactatttaatgtaaaatattctacatgtcattcagatattatgtatatcttctagcctttattctgtacttttaatgtacatatttctgtcttgcgtgatttgtatatttcactggtttaaaaaacaaacatcgaaaggcttattccaaatggaag

SEQ ID NO: 58627 - DNA, 486 bp, Homo Sapiens
  misc_feature (473)..(473): n is a, c, g, or t
tttttttaaagcaagaaatatactttatcgactttaaggttccatcaatttaattcaggatcattattttataaaccaaaagaaaaaatagtaattaaagttttactgaaatggttctcaactgggggcgattactgtcctctaaagggcatttggcaatatctggaaccatttttgttgtcacaactgatgagaaacgaccagtctttagtagataacaggtcagggattattgctaatcatctaaaacgcacaagagacctcccacaaaaaaaattatttggcctaacatgtcaataatgccaaggttgagaactcctaaactacagaatgttagaagttgaaagatgcatctaggatatctaaaaagtattttaagatagaaacaatgcagtagttcagtttacctggaatgaacccaagatttgtaaaggaatactgggaaacaatgctggcactctatctgaatctgntctctcaccttgg

SEQ ID NO: 58628 - DNA, 577 bp, Homo Sapiens
gcttataaatataatttattacctgtttaaaaattctttcttacattttgtacatgttggctgacagaataaatgcaggcaatttacaaaccaaggggactgcagggaaaatcaggattggcagccagggagagaaaagaggcacacccggagctggtatccctcacctccaccactcagcaaggcgccggacagatatccggagggcactctgcctctgccggggggtttttttagaaaaggaattgcatagaagatacagcaagagggaactccacaacaacaaaagtgttccatatcggaaaagccaaggttgtcatgttttgtttaaaaaagaaaaacgacaaagcacaaaacctcaatccgacctttctgcagttgaactgttccaaaggggacagtaggtggatgacactgcctcttcaacacgactgctggggatttttctctgacaaacattggtgtcttctttacaaagagcaaagaggaaggtcaccaacttgcttcagctcaacattaaactcaacacatataacaccatgacatcacacacacacagtgatgttccctgcaactg

SEQ ID NO: 58629 - DNA, 492 bp, Homo Sapiens
caaaaatagtgttattaattctgatgtctccgaagcacaaaaaaaaaaaaaaaaaagaaaagaaaaaaaggaaagaaagaaaccacccttcccacaattcaggccccaggtccaggccaagggggccacacctgcaggcagtgcaggcccaggggctgaggtggtcctggccacaggctccaagtgggaccagcccatggtttggctcttagggcctggctgggaggctgactgcctccatctggggagcccaggccctggactggggatgagagagatcaggggtcaaggtcagaggtctgggtcactcagttttggtactctggccaaggcagccaaaggtcagggttcagacatgtaggccaaagccactcagttctgtggtccagcagagaggcagcagagcaggtccgttactgaatcctaggaggtggtccagtgggcgccaggtagctcagtactggtgttccagcaggggctgggctgccgggc

SEQ ID NO: 58630 - DNA, 6503 bp, Homo Sapiens
aagcttgctaattagaggaaagtcaggaaatgggaaccattcaaagaagaaaatacccccacctcctactctcacctatccaaagacaattaggtgaatcccttagtagatatctttccagacggttttccatatagattcccatatctggccaggcgcggtggctcacacctgtaatcctagcgcttggggaggctgaggcggatggaccacctgaggtcaggagttcgagaccagcctgaccaacatggagaaacctcgtctctacgaaaaatacaaaattagccgggcacagtggtgcaagcctgtaatcccagctactcaggaggccgaggcaggagaattgcttgaacctaggaggcagacattgtgctgagccgagccaagatcatgccattgcactaaactccgccttaaaaaaaaaaaaaaaagattcccacatctttactagtttgcagaaataagatcctagcatatgcagtgtgtaggaaccaccttggtttagccacgtctctgtgactgggggccactgtggtgacccccagctccccggacagagtcaagagctcaccagcctgcaaaggttttcacggcccccagccagactcgggggcttcctcttgccctgctacttcctgggagctctgagggcaggaaatggcgccactcagctcctggcctaacagcttggggaccacaaatgcaaaggaaaccaccctcccctcccacctcctcctctgcacccttgagttctcaggctcacattcccaccacccacctctgagcccagccctccctagcatcaccacttccatcccattcctcagccaagagccaggaatcctgattccagatcccacgcttccctgcctccctcaggtgagccccagacccccaggcaccccgctggcccctgaaggagcaggtgatggtgctgtcttcgcccagcagctgtgggagcaggcgggtggggcaggatggaggggtgggtggggtgggtggagccagggcccacttcctttccccttggggccctgtccttcccagtcttgccccagcctcgggaggtggtggagtgacctggccccagtgctgcgtccttatcagccgagccggtaagagggtgagacttggtggggtaggggcctcagtgggcctgggaatgtgcctgtggcttgaaaagactctgacaggttatgatgggaagagattgggagccattgggctgcacagggtcagggaaggccaggaggggctggtcactgctggaatctaagctgctgaggctggagggagcctcaggatggggctgatgggggagctgccagcatctgttcctctgtcatttctgataacagtaaaagccagcatggaaaaaaccgttaaaccgcaggttgggcctggccgttggcagggaagtgggcagaggggaggcccggccaggtcctccggcaactcccgcgtgttctgcttctccggctgcccacctgcaggtcccagctcttgctcctgcctgtttgcctggaaatggccacgcttctccttctccttggggtgctggtggtaagcccagacgctctggggagcacaacagcagtgcagacacccacctccggagagcctttggtctctactagcgagcccctgagctcaaagatgtacaccacttcaataacaagtgaccctaaggccgacagcactggggaccagacctcagccctacctccctcaacttccatcaatgagggatcccctctttggacttccattggtgccagcactggttcccctttacctgagccaacaacctaccaggaagtttccatcaagatgtcatcagtgccccaggaaacccctcatgcaaccagtcatcctgctgttcccataacagcaaactctctaggatcccacaccgtgacaggtggaaccataacaacgaactctccagaaacctccagtaggaccagtggagcccctgttaccacggcagctagctctctggagacctccagaggcacctctggaccccctcttaccatggcaactgtctctctggagacttccaaaggcacctctggaccccctgttaccatggcaactgactctctggagacctccactgggaccactggaccccctgttaccatgacaactggctctctggagccctccagcggggccagtggaccccaggtctctagcgtaaaactatctacaatgatgtctccaacgacctccaccaacgcaagcactgtgcccttccggaacccagatgagaactcacgaggcatgctgccagtggctgtgcttgtggccctgctggcggtcatagtcctcgtggctctgctcctgctgtggcgccggcggcagaagcggcggactggggccctcgtgctgagcagaggcggcaagcgtaacggggtggtggacgcctgggctgggccagcccaggtccctgaggagggggccgtgacagtgaccgtgggagggtccgggggcgacaagggctctgggttccccgatggggaggggtctagccgtcggcccacgctcaccactttctttggcagacggaagtctcgccagggctccctggcgatggaggagctgaagtctgggtcaggccccagcctcaaaggggaggaggagccactggtggccagtgaggatggggctgtggacgccccagctcctgatgagcccgaagggggagacggggctgccccttaagtgtcggtgaatagtgaggctggaggccggaatctcagccagcctccagcaccttccctctcaccatcccactgccccctcgctcccatgtttccacccggcaccctgatcctcacccgaatctcctttttttttttcttttgagacagagtttcgctttgtcgcccaggctggagtgcaatgcacgatctcagttcactgcaacctctgcctcctaagttcaggcgattctcctgcctcagcttcccgagtaactgagattacaggcacccaccaccatgcccagctgcttttttgtatttttggtagagatggggtttcaccatgttggctaggctggtctcaaactcctgacctcaggtgatctacctgcctcagcctcccaaagtgctgagattacagacatgagcctccgcgccttgcctcctcacccacctcttcactctgaatcctcatgaggcttctcagccctggatttcctgctgccatcctcacccagcacccacaactagcgcctgggcagggcagggctggcacctctcaacgtctgtggactgaatgaataaaccctcctcatccacccctatttatctccatcaccatttccccctctttcttgttcctggaaacggctgctgagtctccatcggccaaacttatctgccctgtgatttctttgacaattctccttttcccccagaacccaccctgggttgaccagagtctgggaagaaggacaagagaacccggcaaactccctcctaggattaactttgtaaagcacccttgccctgtagctgcaagggctgtggaacctgggcagcccgcaaccacctttagctctgggccccccaggccagcctggagcatggctgggtggggccaccagcccatgctctcaggcgggcctgtgatctttcccagggcacatggactgtaggctggccctggcccacaccaccacactctccccagccatggacagaggcagccagaggcctcacggtttctcctccgagtttctggctgggtgtagttctcagaaaccccagtgcctgcgtgtgtccactcgtgggtgtggtttgtgtgcaagagctgaggatttggcgatgcttgggaggggtagttgtgggtacagacggtgtgggggtgggaagtggtgcagagactgaagagggtcaacctgggcatgggggacacagggactgctgagaacgtgcgtgtcatctttgctctgatggggtggacatagcagaaaatctaactctgtctgtagccccatacagaatgccagggtgagcacagtggctggtgcctttaatcccagcactttggaaagttgaggcaggaggatcgcttgagcccaggagttcgagtctgaagtgagctgtgattgcaccactgcacttcagcctgggcaacagagtgagcccctgtctcaaaaaagaaaagaaaaagaaagccaggcttcatggaaagatcgtatgtgtgacccaaatatgagttcttcagctcagccatggtaatcccttccttgaagtctccatttctgcagtacacatgcatgtgcgctctctctctctctctctctctcacacacacacacacacacacacacacgcgcgcgcgcgcgcgcgcgcgcgctctcctgcgaacagaggcagggggagaggggtttgccctggtctcggggactggtctggctggcgcttccccactgcacgtttccaggtttagtttgtctgtgtctcctcttccatcccaggggctgagccccttccatcctccaagaggaaccagtgagagtgagtgaaggaggggcctggagccagggacttcccctgtggggcctgggtggagaggggagaactcaatggtgctgcctttgagaccagcccagctacagcccaggagcacacatgggccagggcagttggtatttcccgaggacaaagaggaaattttcaaagaggaagttgttgagttagagcttgcggtggctgagagcagacaggttgacctgcaaaaaaagacaggggaggcatgtgagtgtgacagccctgctctgtggcctgggcaggagatgggggaaagggtcaggtgggggatgggctcgtgcagtgggagaggagacggagggagggagcgggaaggggcttgcttagtgggtgggaagagctgagctcggatggaaccagcttctaccagccaggctgggcacccactgggctgcatctggtggccttttctgattgctatttggactcactgcagctgcagaatgacagaggccatgtccaaaatcccttagagacactgttgtcttagagttgttaaaataagagcccccatatcaggtttagaaaatactgtcaccgaacgaacgtcgctgtcctcagctccacctccctttcctttgacagatatggttgttttctaagccaggactggttttagtcaggtcctgggcgaatcctgaaaaaaagaggtagtacgggtaaggaaggcacccaacagggctttcacaatccagaaaatatcaaaatataagtgttaaaagagaggcacaggccgggtgcggtggctcacgcctgtaatctcagcactttgggaggccaaggtgggcagatcatgaggtcaggagtttgagaccagcctggccaatatgatgaaaccccgtttctactaaaaatacaaaagttagccaggcatggtggtgtgctcctgtaatcccagctacttaggaggctgaggccagagaattgcttgaaccctggagtcagaggttgcagtgagccgggatcatgccactgtactccaggctgggtgacaaagtgagactgtctcaaaaaataaaaataaataaaataaataaaagagaggcacaaacagtgttatgaatgcaccaaggaaaatggtgcattcataactctcaggtgaagcctaccaagccatgcgtgtgtgcacatatgtgtgtacgtgtgcatgtgcgtgcgtgcatgtgcgtgcgtgcatgtgcctgtgtgtgtatgtgtgcacatgtgtgtgcgcatgtgtgtgtgtgcgcgcatgtgtgtgtgcatgcatgttctcccatgcatgtgtactgtggcaagggagactttgaggaagagattccagtggctgagcagaagggctcgcattgccctggcgaaaggttggaaggcttcacctgagagtgtgtcgtggcctttgtcatatccactgcttgattcctttctttaaaaattatttttattgttttctacatatgagaaccaccacacctggctaatttttgtattttttgtagagatggggtttcaccatgttgtcccggctggtctcaaactcccgggcacaagagatccacctgcctcagcctcccaaaatgctgggactataggcatgagccactgcacccagccactgcttcattcctggtggctgctgtgcctggcatgttgcagatcctccatgaatatgcatttgaatgaatgaatgaatgaatgaatgaatggagatgacgcctcagagattctttcttttgagatgaggtctcattctgtcacccagactagagggcagtggtgcaatcacagctcaccacagcctcaacctcctgggcctcccaagtagctgcgatcacaggtgtgcaccaacatgcccagctaattttttttttaatttttaatttgtacagacagggtcttgctgtgttgcccaggctggtctcgaactcctgggctcaagtggtcctcccacctaagctt

SEQ ID NO: 58631 - DNA, 690 bp, Homo Sapiens
  misc_feature (322)..(322): n is a, c, g, or t
  misc_feature (479)..(479): n is a, c, g, or t
  misc_feature (509)..(509): n is a, c, g, or t
  misc_feature (574)..(574): n is a, c, g, or t
  misc_feature (603)..(603): n is a, c, g, or t
  misc_feature (610)..(610): n is a, c, g, or t
  misc_feature (626)..(626): n is a, c, g, or t
  misc_feature (631)..(631): n is a, c, g, or t
  misc_feature (642)..(642): n is a, c, g, or t
  misc_feature (651)..(651): n is a, c, g, or t
  misc_feature (670)..(670): n is a, c, g, or t
  misc_feature (688)..(688): n is a, c, g, or t
catacaactcatttataatttattttcacacaactcactatgttacaaaactgtacacctgcccccaaagttggataacccaaagtcacattccttggaaagagaagaatcaacactgggccgctttttcaagagcagtctcttctggattgggcccaacaaggctagaccagaatgtggagtacaggaatggccattcttcaagtccgaggggtcaggttcttagcctggtgcttccagtcgttacaggaggggtgtctctgtttggaaagccagcaccagcacccagaacacaggagtccagagagacaggcaggcactnttggccaccatctggctgtggtgggaatgcccacggcgaagggagccgcagttcagtggagatgtgcctgtccaggacagggacctggagttgcgggactatgtcactctcctccaggcggacccacagatcgctgaattgccggagtcgcagcctncgctgtgaccgcctccgcttcttccggaanctctgttcggcctcactgggcgtgtcggcacttccaggccgggacacaaggggaagcagcttgantgcctgaggatacggcttctggtgccggncttccanggtaaggacttttgangcaanatggtggacanattgggccntttggaggtttttaccctncctttgtggatgggtcgnaa

SEQ ID NO: 58632 - DNA, 372 bp, Homo Sapiens
tttttttaatttacctgatgccctcatcaggtcgttaaaaattcaaatggttttaatagctaaaaaactacaaattaagctctaaaacaaacaaactacagaaatgtaaaccttcatttgccaaaggtccttggtggcctgtcccctgccctggccacaccgccagcccttggtccttatctgtgtgaggtttacaaataaagcttctgatgtcaaatgtttaaatcgtgccctcagtggacgaggccatgtcctgatgcagaaggctgagcccaggctctctgtggcgccgctgagagcagagggctgtcttggggtcttcgagctctggagccaaggatggcctggtcctacttctctgcccccaccaat

SEQ ID NO: 58633 - DNA, 535 bp, Homo Sapiens
tttttttttaagaatactcattataggtttaattaatcacaatgatggatatctttaacattaggcaataattgacagttttatagtggtgagactatcatcacccaaaatacaatttttaaaggtcatattcacttttcctttcaacatcataaaatcttgaatgaccacaagtagagctcaacagagaataatcaggcaaaaaatcaggaatgttcatcatcgaaggtttgactatgtcctcggttgatactcataaatttaaatatggtaggtagaaaagaaataacacacagatttgtcaaccatatgtaacagaatagttcagttcagcaaggggaattcagaattctttctctgctggctgagcctgtatgtcagccaacaacatccacttagtctcaggtgacaacagtgccagttaattagcttttgtttatgttttgactattgatagacttaaattatattcatattattatgcaaaacaaacacatagaaagtcttgcctttgatctaaatacaggcacttctt

SEQ ID NO: 58634 - DNA, 2535 bp, Homo Sapiens
ggcccagacgccaaggttgcgggtcatggagtcccgaaccctcctcctgctgttctcgggagccgtggccctgatccagacctgggcagattacaattacaatcaaggcagaaatgatctcatttttacattacaactcctggaaaaggcaatagactgagatgcaagtgtgcccccaagtgatgggcagaaggagagaaggatgttttggatgcattctagaacacaggtaatctaaggagagttgatycaaggcacgtaggaagagtcctccagccactattaggccatcaaaggagtcctcatgtgtcccaggaaatggtcctgctttggtgtccctggtgtgacccatcacccgctggaacagcctgagagaagtagggcctctgcaccaatgctgctgaggatgtcagagcacaggaacgaggccttgggaaattacctggaaatgcgactgaaatcttccttcctgaggggtctgggctcttggaaatcaaaccctctcaggttgggtggctggacgattctcctcacacttacaatgggacaaggggaaccaggaggtccaaggatccctgggttccacacgaactcctcctaccctcattgtgtgacagcagccatgcctcctcctggggatcaggatctattacctgtgcctggagaggaggggactcctcttctcacccgctggtctctggacacatactgtccaattcccctgtggcagctgtaatgtgtagttcaatgggcactcatttgtcccttttaagggtaccctcctttagaatccaggaccttctaccctgcagagtgtggtttggggagagaagtgcaaaatcccacgacaggtgagttgaaggaatgggatatggagccacatccacttccaccccttggtatctggacccacgtgttcttcctactgagattacagaactgtagagatgtctttgatttttaaaatgcaccatgtcctgaaagatggcaccctcccacccgcaggagtgcttcctgcaagctggcgttgagctgtgcctatagaagctcttttcaacattctttatggtccaggagcccttggttggtgcagatggtgataggacccagtgggtcccacagcatggccacactgcacctccttcgctgtcaagtgggtcccccacgaagatactgcacggagagcagtgccaagcctgtggatcaggaatatcaacagcccccagagagtggtgctggctgagggtctgagagcaggacaggaaaacccacctatggaataggtgcctatccctgtgaagatgaacctctggcccttccaggatggaaggagtgcaatgtagtcaactcctcacttagggtctggttggtcacctaaagaaatagagccctaccagggaagatcattgggttcaaatgctgatgagtaggacatttagaggtggcagtgtctggatctaccttggtaggagggagtcagtactgttggacccataggtagcctcatccctgccactgtgtttgctccatttatgtacccacctacccggcctgggctgaccatgggaaggctggctaatttcagtgcttgtgcttggttgttcagggccatttcaggtttgggtgttttctggggatgttaacatgggattcaggctcaactcacaagaaacttttcatctcatgatggatgctgttgggcatgtccaatgtatgacttcatgagttacacagatgctaattcgtaggggcacttggaatcacatggttgttttgtgtcccatggtcaagcattctatcttatcagggcctacagtaacatgccaaaagttgcttccaacatatttctctgctttggatggggcatatttctgtgctgtggatgacatggccttactccagaatcccaggccctccactgtgactctcctactggtgcttggttcagctccaccccaaatcttaccccaccactggcactttcagcaccagggggtctgaaggatggtgactgcgccatggcctggatctgctgcagtgtcctttcctgtggaggctccactcaaagctggcatcctcctatgtcacctagagtgtgggtcaaagcaatacacctacatgtagaatgtgatgtcagaactcaaacaggctcaccaggcagtgtgcttcttccttgcatgaggatgcaagatgcaacagtttgtcttcacattggaaggacacccctggatgcccctaaccactagacctgtaaaacttcactgcagtggccacttctgaatctctgtaaggtttatttatcttcacccctctggagagaagatgttttaccaaagcctctagtgtaccgtcctcctcttactcatccatcccagtcaacatgatgttgtcaatgaaataaaggaatttaatattctatagtatatccaggttctccagatctcttaagactgtactatagaggcctggggaattataatagccctgaggcaaactatgaattaaagtgttgtggatcccacatgaaaaaaaaaa

SEQ ID NO: 58635 - DNA, 504 bp, Homo Sapiens
ttttttagaacagtggatctctcttccactttaggaaaatgttatctgtctagaaaaatggccatttttggtagcaaaacttaaatgtgtaactgtgaaaaatgcacgtttaaattagtagaaaaaaaaataacaatgcaattctccttggctagaatgtttttgttcctccttgaaattttaaatcaacacaacgtagcaaccctccctgcccacctcagaaaaggtcacactgtatgcactgtatgaaccttgtcaaaattctacgtattattcaaaaaagttttcatgccaggatattctccaaattcttttttcatttttttttctggagagtgctctattctaggatttaattacacttcaaacgtaattgaaatttacctaccctgcttgtccaaacaatcaagagccacttccataaaatctaaactactttagatataaaccatttttaccaaaagtcacatcatagtcacaactgcaaactggcattgctatgca

SEQ ID NO: 58636 - DNA, 4673 bp, Homo Sapiens
cccacgcgtccggccctgaccagcagacaccatccttccagcctctcttggccacccagaccagcgggcaccaccctcccagcctcacgcggccaccctgaccagcaggcaccatccttccagccttgctcagtcaccctgacccagagggctgccctgaccagcgggcaccatcctcccagccccactcagctgccctgaccagcgggcaccatcctcccagcctcactcggccagccgagctctgtaggcctcagagtgcagagaacctcaaatgttgtgactttgctctgctgcagggacctgccatggagtgtcccttgtgcgagcattttgagagctatgccagcatccatccccgcaggtcccatccctgagccatttctcaggagagcaggaagggagcagggagaggggtgctcccagccagccccggaaccagaggtctggggacgcagccgaccagccctccttgtctgggcctctgtttcctcttcgacacagggaagcagggaggggccgatcagcgacttaggcctgttggctgtggtggggtccacctgcgtttctggggagcccacggaccctggggtgtacctgggtttcattcccagtgacctctcctattggtccccatttggggcgctgagatgtgatcgtttctttcctgagaatgagctgaggtaaaaacatgctggggaggaagatgggccctgggggcagcgagctgcgcctctgcaccgggagaaaggccgtgtccccagagctgaggcggtggtgggcagggctcctgagaagccggggcagggcagggtgtctctgaggtcaatgaggaacagctgaggtccagggacgcaggaaggatggggtgaactccgggatggggccggcagggagcctcacgcttacagagcctggtgttggcactctcctggcttcctccgcaaacctagccacgtggtcagggagcccgggcctagcagacggcccccaccttgacagaatccccagggtcgtgcgtggcggtgggggcgacttcacagccgagaccgggcctaacgctgctgtctcgcagtcacccctgcaggccgctcagggcagggctctggcctgacgggggttcctggacacgcctctgagccggcagcccctacccgcacccgtgcaccttccacgcccgtctccagcagcccctgcccgcacccgcacccctgcacctgccacgcctgtctccggcagcccctgcccgcacccgcacccctgcacctgccacgcccgtctccggcagcacctgccacgcccgtctccggcagcacctgccacgcccgtctccggcagcccctgcccgcacccgcacccctgcacctgccacgcccgtctccggcagcccctgcccgcacccgcacccctgcacctgccacgcccgtctccggcagcccctgcccgcgcccgcacctctgcacctcccacgcccctctccggcagcccctgcccacacccgcacccctgcacctcccacgcccgtcttgccctggggcccaggtgcaggtctgtgaggagggcagccccgtgctcccgtggccaccgctcagccaagtggattcagcgagggtttttagtgtttgtgcctgtgtccccgtgtgcctgtttcctggtgaggctggacgcctggcatgtctgaacactcacattccccaggcatgcatgtgcagccgccgccgccacccatgtactgtggcgctgacccctcctgtaacagctgtggtcttggcctctcgtgttggtggcagatgtcccatttcccagttactttctgttgtccaaaagtttaactgtcctgccagccaaagctgctgagcattactctgatagaccatcagtccttggtaagtgtcctgtgcatctgggataagcatccgtttgttttcagctgcgctttctgtgacttgctctgcgtgagtcctcggtccacgtgggccgttgcgctggttcccagcctgcccgacacactcactgcgacgcctcccttgcctactgcttgctggcttctgtgttctctgcagtaaacattgatttctgactcgagtgctgtcttcattgagctctctgcactctggggatgcagtcagcgaccccacgaaggctaccggcttcctcccagggaacagtgcaggtgctgcttcccaggaccacaggaccctggctggtcgctgcctgtgatgggtctccacaagaccactccccattagccagactcacaggagactgacacataaatgagaaagttgttcactaactcacaatgggagcaaccctttgcagtgcggaaatgctctcagcctttctggccccggatacctgggaagctaagggttcattaggtggcctagtgcctgcactcaggatgccccagaggaggccccggggttcctgaacgccttctccaggccctgtcttcagcccttctccaggccctctgagttccaaacagcactcacttttgtctggtcctctgttccccggctcgcacctccttcgtcagggcagttgctctcaaccaggggtacttctgcccctggggcccactcggcaatgtccgggaccgtgttggcggtcacagctgggcgggggcaccaccggaatctggtgtgcagaggcgggggtcctgcccagatgccagaggtgctgcaggtgagagatacagatttagaccctgtgacgacaaagaaaaggacgggaaaggtggctctcaaggccccagggaaccgcccagagacgcctggggttccagaagctggaaaggcatggagcggtgcgggaacaagcctctgcggtggctggagatgtggggatggagactggtcatgccttcacacacttaaccagaaccctcccagctctccctcccctgcaaccaagccagcaaggcgacacggtggctggcgctggcgagaggcaagtgtgcttgactgcctttctccactcttgaggacaacacccagagtggccccgtctttgccccaccagcccaggcctaaagcttcctcatcatccgcatcccggcctgggacttaggcggacttctgccagctgtgtcacgtgcaggggactgcagccactgaccccctctcccttctgtcctgctcttctctaccccacagccccaggcagatcttcagtgcgtgtcagctctcctccctccctccctgcagacccctgtgccccgcagtgccctgagaatgacgtctgagcccccagtggaggtgtcaaggctgttcggtctgtccccatcccgttctgtcctccccttgctcaccacactcccctgcctggtcttccaaactcgaaccccaggcaactccttcagccatcagacctctgcccctgcgcccctcctgcctctctgtgatgggctggcccttcccttctgctgcctcctctccctccttcctgctccaacccctatctctctctgatgctgccccttagagaagccttcttggaccttaagcctggccactcctctaagcccctcatctccaggtgtggtctaggaagtgctctcagcctctctactccagtggctcgggggctctgaccagccctcctgccagggaagctttgaaggttcccacagggacccctagagacaagggcactgcccgtccagatggcaccctcaccccaaccccagcagcactggctggagcaggccatgcctgtgtgggtatctgaacaggcactggattccccgatctcaacaaaagaagcccatggaggccttttctaatccacagtccaagaggacaaatcaagacaacaggctgcgggggctggctgtgggccgactcccacgtcttaggaccaggggctctggggctgtttgggctggaacccctcctcccagcataacaaacactagctcattatttacagtgaatacccaacaaaaccctgctcgaggtgaggagcggggacctgctgctccaacagaccagactggctgctggctccgagctcattaaatcagcaacctttgcactccggctccgagctcattaaatcagcaacccttgcactccctccaaagccctgcccgtcaccttcacacctccctggtgggggaaggggattcttccactctgattacacccgttcccatctcccttcactcctgtgagctggccaggctgaggatttgtccaaagggcctggggagtgagacgctccacagcttctcatgggtcagccgacatggacggtagcttgggtgactcagcttcccgtgatgcgctggatgcacagggagctggtgacaacagcctgtgtgtgtgacagaacagcctgtgcgtgtgacaggacgtcaagaactacatacaaagacacagctgcccccaaaaatgagtctgcacagcctggtgcaatgcagctgcagcctgtcatcgagtcaattgcattgtcgtccgccgctctcctgatgtagttctgtgtttgtccattttgcactgctataaaggaatacctgagactgggtaagttggtgagcgcctgtagtcccagctactcaggacggtgaggcaggagaatagcatgaatccgggaggcggagcttgcagtgagccaagatcgcgccactgcactccagcctgggccacagagcgagactccgtctc

SEQ ID NO: 58637 - DNA, 617 bp, Homo Sapiens
  misc_feature (243)..(243): n is a, c, g, or t
  misc_feature (376)..(376): n is a, c, g, or t
  misc_feature (565)..(565): n is a, c, g, or t
ttttaaattaccgaccaaaatatataatggtggaaatattccaaaattccatattttgggatttatacacaaaagataaacaaattagaagccaagaggctgccagaagggaaaaacggggcctggaaagcgttgtgaggaatgagctgggcctaaagaggccactggcaggcagtagctggacctgccgaagtggctgaaaggcaggagctttggactggggaggccgcagtgaggcgagantagctgggcgtggagagtccgctgtgaggcagaggctgggcctgtgcaggcttcgggaggcaggaggctgggcttgtcgaggcctgcagaggcaccaaaagtcaaaagcggggcttgggaaggccgccggganattgagctgggctgggccgaaagaggcactgggaggcaggaggagctgggcctggagaggctgctgaaaggcaggagctttcgcctgaggatgccacagtgagacaccatctgggtctggaaggttccactgtgaggcagagctgggcctgaagaatctgctgtaagcagatgttgggactgtagaagnccacggagcacagctggctgaaggccccaagattcagactggctgaaagtgc

SEQ ID NO: 58638 - DNA, 533 bp, Homo Sapiens
  misc_feature (479)..(479): n is a, c, g, or t
  misc_feature (493)..(493): n is a, c, g, or t
taactttcataatgtattttatttttacagtaaaattaatttatgtaaattgatagaattttactaatttcactcccaagttacattaaaaggcttacatatgtttgataatagcatatgtaaactagaactctgaatgatatccattggtcataatacgtactatgtagcggtaatggtgacttttgtgattgcacaagtctagagatgccccaaatgacattgacttagacatctggttattctaaggctgaaactgaagttgaatagaaggttttagtcaaatactgagatgaaaactgaggcagtcctggcgggggggagtgagtgtgtgtgtatatatacacacatagacatcatgcttctaaacatttacagaaagaaagggtagattatctacaaaaaaataagaatcagactgatatgagatcttacaaacctaacccccttctctttcctaaactccagattctcatatntctgacttcctatntgatatttacacttcgatatttaccaggagtcttcaacat

SEQ ID NO: 58639 - DNA, 1169 bp, Homo Sapiens
  misc_feature (332)..(332): n is a, c, g, or t
  misc_feature (423)..(423): n is a, c, g, or t
  misc_feature (791)..(791): n is a, c, g, or t
  misc_feature (993)..(993): n is a, c, g, or t
  misc_feature (1010)..(1011): n is a, c, g, or t
  misc_feature (1034)..(1034): n is a, c, g, or t
  misc_feature (1044)..(1044): n is a, c, g, or t
  misc_feature (1046)..(1046): n is a, c, g, or t
  misc_feature (1050)..(1050): n is a, c, g, or t
  misc_feature (1056)..(1056): n is a, c, g, or t
  misc_feature (1059)..(1059): n is a, c, g, or t
  misc_feature (1072)..(1072): n is a, c, g, or t
  misc_feature (1087)..(1087): n is a, c, g, or t
  misc_feature (1127)..(1127): n is a, c, g, or t
  misc_feature (1131)..(1132): n is a, c, g, or t
  misc_feature (1135)..(1136): n is a, c, g, or t
  misc_feature (1141)..(1143): n is a, c, g, or t
  misc_feature (1150)..(1152): n is a, c, g, or t
  misc_feature (1162)..(1166): n is a, c, g, or t
  misc_feature (1168)..(1168): n is a, c, g, or t
tcctatcctcatatgtgctcaagacagtgctgctggcagtgctgctgcgcaagggggcccctgggcaaggctgggacgaggagcacctgggaaggtgtttggaggagttggtgcagttccttagggactgcctgctgcgacgccatacgctcttccactgcgtcctgggccctggtggggcggctgccgaggtgggtcccctgcccaaggcactgagggaagccgccccagttgacctcctggccgctttcgacgggcacgcccgggaacttgcagcagcgcggttgctgtccacgtggcaaaggctgccccagcttctccgggcctacggnggtccccgctaccttgccaggtgccccccaccccggagtcagcgcacccagggcttccttgaaggtgaaccgtaaaccctgacagcacccncacctgaccaaatgctcctaaagcctttcccactgggtgggggtgggaaatgcggtgaagccagttaaatgcaagattgcagaaggcattggaaaatttggtggctgccacaagctttagtggcttagatatcaccttctcgcttcacagttcagtataatatgacatcttcacacccactagagtgtcctgggcaaccatgggaagacatccaacaggagacccaagaattggttcaatatttgtctgtgtagaccgattctgtacaaggattggcttttagagaagtcaattgagaagccagacttacttgagggaaagtcctttggtcggttttgacccgattcttctgcccaatttaaaaaaanaaaaaaactttggcccattcttggcttgagggccattccctatgggtccattatatccgaaatctgctatgggttctgtggaaaatgttaccgtccaatccccaaacatcaaacgggaacaaaggaaacggggggccataggtgaatactcaatttgggttgcctatctgcttttcagggaaccctgtgcatgtttaaaatncacaaccgggggaggtnntataggccttcttttctataatnttttctctgntngtgnggaggntantctaagaggaatngttacaaaaggaacncgaaaactgtaacgcaaagggcacaaaggctgtttttttncccnnctnnacaannntctaggnnnaccccataannnnncnt

SEQ ID NO: 58640 - DNA, 5266 bp, Homo Sapiens
catagcataccatttatcgggctcggcgcaggcccgcggggagcgcagcccggcggagagactgatggagaggcagaaacggaaggcggacatcgagaaagggctgcagttcattcagtcgacactacccctaaagcaagaagaatatgaggcctttctgctcaagctggtgcagaatctgtttgctgagggcaatgatctgttccgggagaaggactataagcaggctctggtgcagtacatggaagggctgaacgtggccgactacgctgcctctgaccaggtggccctgccccgggagctgctgtgcaagctgcatgtcaatagggccgcctgctacttcaccatgggcctgtatgagaaggcgctggaggacagcgagaaggcgctgggcctggacagtgagagtatccgggcgttgttccgcaaggcacgcgctctcaatgaactgggacgccacaaggaggcctacgagtgcagcagccggtgttccctcgccctgccccacgatgaaagcgtgactcagcttggtcaggagctggcccagaaactggggctgcgagttcgcaaggcgtataagaggccccaggaattggaaaccttttctctgctcagtaacggcactgcggctggcgtggcagatcaggtaggatcggggctgaaccaacctgtctcagtttatccgttatgagaggtttggattcactctctccgggtataaatgacctcaggcagtgggtccaggggcctccgcctccctaggaggtacctcccgtgtccacgggggcaggatgtggggacaggccatggctgctgttggcagggagtggtcattgccggggagccgccgggggcagcctcactcttgaaccctggccaggacacagtctgggcagcctggtcccacacgccttccttctgcctcctgccccacatttcctgctgtgttgccttttttctcaccagcctttctgcaggttcaggcccctgggcctcaaatgtcttcctcttccccaccctgcctttctctgtcttttcgcttttcaaagcccagctcaagggcatgcccctgccgtaacccatcctgctctccctggctcagtgactctgcttgggaggggcagccgagactgaggactctgacaaggaagagcccaactgggccctgcagccttggacaggtccttcagtttctgcattctgaaatgcggaccatccctcaacgggaacaagggaggaaagtgcttgataacctggcacacacgacccagcaggaaatgcagtgggcagtcactgtggatagctgctgtgctgtcctgagttggggactcctcccaagggccaagacacttgtgcaccccagtcaggcctggctcatcccagggggggtgaggcagggcctggcacacgactgagacccctgcccgctgctcaggtagactttgaggctttctggaaagtgagagatgggctataagagcactgatggagcctggggtcctgccaccttgtacattaagggaaactgaggcacagagtggggaggggacggggccagtgtcacacagcgaggcagcagcaggcctccctcctccagagctttgcagcactttctttcattcattccataaggaggcccacaaaacactctcggccctgggcctgagagagctgcgtccttgccctcagggacctcccagcctgcaaagtaggcagttgatgatctgcctttgtagcactcatggtttataatcagaaattataggtcaggcatggtggctcatgcctgtaatcccagcaatttgggaggccgaggtgggtgatcacttaatttcgggagttaaagaccagcctggccaacataatgaaaccccatccctgccaaaaatacaaaaattagccgggcatggtggcatgtgcctgtagttccagctacttgggaggctgaggcaggagaatcacttgaacccaggaggcacagtttgcagtgagccgagatcgcgccattacactccagcctgagagacagaatgagactccatctgaaaaataaaagaaattattaggcctggcacataccaggtgctccaacgagaaaacattaaatgaatgaaaggtgatttgtctaagtttacccagtatgggccaagcactgagcttggggttgggtatgtgataaacaaaacaaatctgtttcctgccctcaaagagctcacagtctaggatggacattaggacattaggcagatcatttctggtttcaaactgtgatgagggctgtgaaggcagagtatggggagacctgggccattgagactgggagccctgatttagacaggattcagtgacatttaagctgagaccggaaggttgaagagttaggggcagggtgtgcaggtgaaacagcattccagaccaggtggaaggtatgtgcaaaggccctgaggcctggaggagctcagagtgtgggaggaaccaacaccaaggcagagctgggggtcctggaacaggagatagaagccagaccgcttgacccctgataagaagctcagtcttagcattgggaaggcattgaggggaggcagcattaattctattcatttattcggaaggtatttattgagcactgctttgtacccagtgtcagttcagacactgggaatagagcaccaaggtagcgtctcatcacagcaagtggagctgggctgggcaggcacagcagatgctcaaaaaatatttgttgaatgattgaatgactgcggccagggggccacagcaaatatgggctgaatgcccagctctccagggccaaggccgcaaagccttgcttagtctgcagccagatgaccacagatggtgccatacctggcaccaggccccccccagtccctgccaggctgttcacccatccctgcaatcttgctgggctcctcctgcacattcatagaggtcaggaggggcatggttagggagggctctaagaagcccacagtggagaggaccagttcagaccctgcctcatgaactcagtttgcccaacatggtacagcacacatgtgagcacacacatgtgcacatgcacaaacggagtgccctaggacacatgagggcagggtggtgtcccagccagagcccctggccttccgtgagttgtgcacagacacaagtaaatgcaggctgcaggggtccctgtaggttctccaccatgagcaccatattcattcagccggctggtcatttcacatgtgcacctggaagtggggatggaccaggctgtgcccacagggagcttcttatgacctaggagccaggcagaggccctgcaagacagtgtctgtgcaagagctgtccctggcatcgtggggaacaagatgcaaggagggctgtgagttccaggaacagagagcccaaggcagccttggttggaaagggcttcagcgagccagggaagcaagactaagaggaagggagagctggagagggggaaatggcactcatgaccaggagcacagcctgcacaaaggctaagcagcaaaagagacagacaccccagatcacaagaccagttcctcctatggggctcggaatagcctgggctctgcagtggaacgtgcgttggatcagatcctgagcacgctccttatctacgcaggccactccacccctcagagccttggcttccttctcttttgcaggggtccggtacctgccattttgtgggggttatagaattacaatgggtcaatgtgaaagctcccagcagggcgtctgcagaagagatagagctccatagacctttgttgccaaacagatgtcaccagaaggagtgccatgcagaagggcaggaacagtgagcctggcaggctggggtgatggcatgggcaggagggctgagaaggtgactttgtcctgcgtggcctgggagccatgggcaggatctagcagggagaatcaccgctttccctagagatgttcatctggtacctctctttccctcaaagactttatgtacttaccatgaggatagcagctctgtgatccagcgtggcggccttggtttggcagccaatctatggtgggcagacactccggagactgaagtgcacacatttgccatgtgctctatggcaggctcaggtgtgggaaggaggtgcagggtgttggtgcaggtatggatgggggagtgtacagttccaggggacagagtcaggacaggctcttgggtcagacagccctgctctgatctgtgcatagcagctttctgggctgacatttccatgccgtgggatgatacctcgcagggcgcctggaccgagggctaaaccccacagtgggtgtgagatgctggcctgggctggcgtgaggcaggatgctggatgagtctagctgctggtcctgtggctgctggtcctgagaaaggaaggctagtggtggagtctggtcctccatccggctctccgtggggacacagaaagggtggggccacccagggcctcaccagggaagcaggacttgagctggactgtgaaggactcagagaaaaaggggagggtgttcaggacagggaaggatgcaccacagcctggaggttggagtgtgggaactgttgaacgaaacagcagctctcccagcccaacttccagaaactgtgcatctaatcaacacaggccgggcacggtggctcacgccagtaatcccagcacattgggaggccaaggcgggtggatcatttgaagtcaggagtttgagatcaacctggctaacatggtgaaaccccatctctactaaaaaattcaaaaattagctgggcgcggtggctcacacctataatcccagcactctgggaggccgaggcgggtggatcacgaggtcaggatatcgagaccatcctggctaacacggtgaaaccccatctctactaaaaatacaaaaaattagccaggcgtggtggcgggtgcctgtagtcccagctagtctggaggctgaggcaggagaatggcatgaacccaggaggcggagcttacagtgagctgagatcgtgccactgcactccagcctgggctacagagtgagactccatctcaaagaaaaaaaatatatatatatatattcaaaaattagctgggcatggtggcatgcttctgtaatcccagctactcaggaggccgagattagagaatcacttgaatgtgggagtcggaggttgtaatgagctgagatcacaccattgcactgcagcctgggtgaccaaacgagactccatctc

SEQ ID NO: 58641 - DNA, 515 bp, Homo Sapiens
tttatttcatataataaattatataatttattttcatctttaaacagtctacaccgaaaacatttttggaaacatcttttccttttggtaaaacaggttagcaggctgacatcagcttcatattctcatggctaaaatcccccacggttatacagttaagcatagcctttctttgtatttctcaagttgacaccacttgataaaaaacaaaacaatataaacatttctagattttgcctaaggccttagctttaactgcagagtagtgagtaggaaattacaaacatatattcattagccttaaacttaccatcttacatgcgcacataccaaaagggcaaaaggaaagtaaaaagtaaggcacaaaaggatgcagtgagtgttaggtctgtttactaagattggccataagagacattaaccaacataatatgacagacaaggaaaaaactgactaatagaaccttttcttaaaaagctgttaatagcatattcaattattatcaaattattca

SEQ ID NO: 58642 - DNA, 502 bp, Homo Sapiens
  misc_feature (212)..(212): n is a, c, g, or t
ttttcagtttttaaaaacctaaatatttatttatttgcattatatttacaaaggtgggaaggagaccaaaggagaccccaagaacacccccacacctggctgaccaggccccttgcactgcagaggaggcagacacagctggatggaacaggatttatgttgcatacttgaactacagcgagtgtaagactggtcctatttacagggcaaanacactgcaggtggagcgcgggggtggcagggtgggcaccaaagtcctggccaagggtacccttgcctgccatcttccccacctctcccagatgcatctctgaggccccgctgggattctccggggggaacgaggcccactcacatgatgctcgctggggtgaagacagggcccacgcacagggtgtctgtgatctcccagccgcaggacagaggcttgcacacaccctccacgtcatcctcctgttctgcagccatcagctgccttcgcagcgcttccctagggtgagag

SEQ ID NO: 58643 - DNA, 664 bp, Homo Sapiens
tttttttttttttttttaagttcacaaagcaactttattttcaacacacttgcaactgtgagacaaagttgggtcatcatgtgctggggacactggatttttgccctaaatgacaggtaataaatctaaacttaggaacattttcttacagtttaaaaaaaattcttctgccctccttgattaacttgttttctgaatacatttagttgctggcttagtggagaggatggggagggaaaggcaacaattattataaattattttggtttttattaaaatgacttttctttcctgcagagacagattctaaaagaaaaacaagtcaaacttctgggatgcctttctctttcccacaggatcaggaaaacacagtgaggccaaccaaaagtatcagccccttaaaaaatatgcataatctcatgtgcaagacactggtcaatctagaacctgctagagaaatgccagaaatgctttatccacatcatgtctctacatgactaatttctttacaattaaatagctttcaaacatcaacatatcagaactgagattgtcaccatctacagcaacagtggaattacacatcatatccttattccattactcatccctcagttatgctaagcagcaagctacagaaacatctgacagcatcaacagcata

SEQ ID NO: 58644 - DNA, 510 bp, Homo Sapiens
taaaactaattcacatccactggtttattattgatcacggggcatttcacatcgacactaaaattctttattgcaagttttacaataatcaagtaaattcagtccaaaaacacaataaccacgataggggtggggagagattctacctatagactgcctctctgaactgaaagttcattttgattttcttttggctcctcaaactgaacagctctgagaggctctccagatgcatttagctttgtctgctgtcttcgccccctctcctcccacacccccccccaacaataatacaaaagaacttcatagctttgttctccttaaaatgacttccccctcactaacctcccctggtgcattttcaatgcaaaaggcctaaggaaagagggggggaaggaggaggaggagaaggatgagaattggctttaaaatttctttccttttttcttttcctcatttcccctgaaattcacccaagccagaccatcacaccttgcaatatataatttt

SEQ ID NO: 58645 - DNA, 2715 bp, Homo Sapiens
ctaaaatagatcagccacaggtgcagcaaatatttttacactctctttgaatagaatcccaaccaccctcccccatgattttagaaataaaggcttcctaaaataatagaacaaattggcaaacaatcactaattggaccagtaggttcttacttaaatatctctcctagatttttagtgtatgttttgggattttatgggtttttttatttatttttttttaagcagacgttacagtttgttttaatctactatagatacgtttttgttttttggcttagttggggacaaaataatttatttgtaagttagctttctaaaacttagagaaagtaatttaattcacgtatcttaaaaataaaattccaaagttaaaaaatttctgacttagtaggaagttaacaaaactactgctgatgcatttcagtttccaaaatctgtaccctccccccataaaaaagggagttaagatgtgctagtttaagtagttagctgaattatagattgatcctcttaaaatctggagtttgtaaaggggcctacataaacagtagatagacttggagggattttgtgggggaattgaaactaatagtattctatctagtttgtcagtgtttactttttgatttttatttttcagaaaattttcctttcccaggacaccctcttgtattagaatatcctcttctgtatcacattaaaaacagattttactgttagaccaaataagatgggcaaatagcaacactagagcatctcacccagtttgaactaggatgttcgtggaagttatgacaccaatatattcctgaaatgaaaattaacctaaattttaaagtgaatctatttgaaaatttacttagataatgaaacctcgttttaattgtgctttttgtgaatccaacacttgtttgcttagaaagtatcttatccagtattaatattttgttcttttgggttttaaagttgagcttattcagcctcaatcacattacagcaagcataaagtaacagttgactcaatgaaagacccaaattgcctgtacagataaaattcactgaatcaaaggcacaatagctatcttttcacttgagctcagaaaagtaagatggcttaatttgaactattaattttcagtggcctctaattaaacaaaaacaaaaaaccacaaatactggctaggtaagatattcctgaggtcattttaaaagaagtgtggcacctaggattcaatatttaatgctaacagtattatattttagtgaaatttattttggtggtgacagtttattaaacctaattagacttctttcaatagcttgttgtagagacaatctcaagggctggaaagtgttgctaaaatgaatgtcatacatttctgatatactaaggagcttataaagtaattctttcatagtgcaagaattattaatttcttagaggatgtttttaaaggagctacttaattgggaaaatgttctttaaatatcagtaatagttcattaagtaacatagtagctaagaacatggactatattttcacagcatagttcagcttaggcacacctttagtttggattattggcattctcttacgtaggaattatatcattgtagatatgtaattatggtaataagcaattttcataaccatgctcactcagactatatcatttgaaactgccatgtttccatttttgacaattcatgttcacaaaacaacaggaacaatttcctatttggtataaagagcaaaatttccaactttgccccaaaatgccatgggtggcatattgccatatgattatatcatatatttaatcatgtatgggaaagattttggattttttttcttatttaaaaaagtgctaaatataagaatatagttttaaatcagcaagtctaataacactattgcagctgtacacagagagaaccttttgtgcctttttgcctgcagtaagcatttatttctattttacatgagttctaagaatgttgatgattattgcaccttgttcttctgtatataaacttgattaaggaatttttttttttaaagcaaggagccgttttttgttactaggtggataccttagtaaacatgaggggaattatcagatagatgtctttggagcccagccttccctgtgtagtgagctggaaactcctttagattgtattcattggtgtgtatgtatatgtacatatatgtataaatagttaaatacataaacataaaacttaacatcgcattgttgtgatgacaagaagtagtaaggtgctaggtggttacattaaaaagcacagcacagtgtataatcagtcactatgactggtggttttgtaagctgggttcagtttttgaaccacccagaatacctcatgtgtaaatacagtgttcatgacttaattgaaatacagttattgtttaaaaaaaaaaaaaaagaatgtgaagccactggttggcttatgccttctgatctatcattcttgcctctttttttgtaaaggggttttcttcttgttgttctgttttttaatagggtttacagctagaattttgaatgccaaagttctatttattaaattaagaaaaaagttttcaatgttaatggctagtatttttccactggactattgtttgttgatgttggaatttgtatttacagagaaataaattttttataaaaagaaaaaaaaaaaaaaag

SEQ ID NO: 58646 - DNA, 538 bp, Homo Sapiens
ccttttaatatttgaatgttctgcgaaaactgaaattgttacaggccaccctgccgcggccagggcgagacaggctgggcccagccagaggtagagagtagttttatgttttttaaaaatttttttaagtttttttttttttcctcctattacctgagtttcaggcgtggttcccacgccgtctgacaaactccagagaaactgaaatttcacacgtcatgaatgaaaggctgagtttacatttgccaaggaaaaaaatgcaaaagcacaattggggaaaaaagggacaaggtgggtaaaacatgataagagaaaggaaattcaactgtacagatgcgtgacccttaacaacgaccccagctgccccccgtgccccgtgcccaccctcccgcctttctggacagccacttacgggtcccacggaaggttccagaagccgcctttctcccaacatctcagatcagggggagcccccgttggccttgactgtggggcacccactcagtacgcagccaggccccacggtcccaagtgaact

SEQ ID NO: 58647 - DNA, 2357 bp, Homo Sapiens
  misc_feature (1391)..(1391): n is a, c, g, or t
gggaccaccttcttttggcttcaacctctcccactcttgacatctgagtagctcagggaagctcttccaggtccgactgttcatatgtaaaggagactggccgctgggctcaggaccgggattatccgagctctgcagaagtgcaccgctattgctttgggagggaaaaaaaaaaaatcacacggtttccagtgaaaaagtgacagagggtggtggcctttggaaccgtcgtcccgtctctccctgaacccgaaacttgcatgctatggaacacccgctctttggctgcctgcgcagccctcacgccacggcgcaaggcttgcacccgttctcccaatcctctctcgccctccatggaagatctgaccatatgtcttaccccgagctctctacttcttcctcatcttgcataatcgcgggataccccaacgaagagggcatgtttgccagccagcatcacagggggcaccaccaccaccaccaccaccaccatcaccaccatcagcagcagcagcaccaggctctgcaaaccaactggcacctcccgcagatgtcttccccaccgagtgcggctcggcacagcctctgcctccagcccgactctggagggcccccagagttggggagcagcccgcccgtcctgtgctccaactcttccagcttgggctccagcaccccgactggggccgcgtgcgcgccgggggactacggccgccaggcactgtcacctgcggaggcggagaagcgaagcggcggcaagaggaaaagcgacagctcagactcccaggaaggaaattacaagtcagaagtcaacagcaaacccaggaaagaaaggacagcatttaccaaagagcaaatcagagaacttgaagcagaatttgcccatcataattatctcaccagactgaggcgatacgagatagcagtgaatctggatctcactgaaagacaggtgaaagtctggttccaaaacaggcggatgaagtggaagagggtaaagggtggacagcaaggagctgcggctcgggaaaaggaactggtgaatgtgaaaaagggaacacttctcccatcagagctgtcgggaattggtgcagccaccctccagcaaacaggggactctatagcaaatgaagacagtcacgacagtgaccacagctcagagcatgcgcacttatgatataaacagaggaccagctccattctcaggaaagaaatgttgtggatggcaagcctttacccaaatatcgtttacacagagagatgactatggcagtgatgtttaatattattaaatccaggcatttcgaatctgtttttcattgatttattagagggtttacacaaagagcttccacagtgaagatggagaaggtgaacttgctttgaatatnccagatttgtttggtcatgcgtatggcagtgagcaggtatgtgttttcttttcttcacgaaaattaaattgctatcaagagcaaactatgaacattatattcaagatgtctccagagtgaagatgccgaggatgaacttgcattgaacattccagatgtgtgagatcatgtgtattgcagtgggcaggtatttgcttttgcttgcactgaaaattaaattgctatcaagaataaaccatgaaacattttatcctgaacagccacagtgcctgaattcactcaagtggataaaaaagtgtattttaactctgtatattacccttaagtcattttcctgtcttcactaatttagcaatgcattcatattagctgatgaaataggcactcacaatgacaaccagagccagtttcttgtctttttatacattttgtcatcccagagactcggtatttgcttactgtgtttcaagtagaggaaatcgtggtcttgaactattctgtaccacagcaaacaatctatgttgctttactatcaactgctgtaatcgtttataaaacttacctagctccttcccttcttctatcatagctttaaacattagaattcataggcaaatcagttaaaacattaggatcataggcaaatcagttaccttgcagaaagagctttgtatgacagacattgtcttattttatttctgtaaaatattagctgtatgaatatgatttaattaacaagaaaacatttcttcctgattgacaacagtgttagcaaggtgcaaagcgaaactggttgctcaagttgatagaaaacaaaattctgaatatcttcaaattaattcggtaaaaacacattattttttcatatgtgatgtattcatgcagaacaactatcttgtattttgtttttaaaatgtgtttaataaatgatcctttgtaaataaaaaaaaaaaaaaaaaaaaaaaa

SEQ ID NO: 58648 - DNA, 694 bp, Homo Sapiens
  misc_feature (583)..(583): n is a, c, g, or t
aaaggaaacaatttattatatttcaggaaaatcattaaatacatgtaataagtttccaattcactgacttaaaggcgtatagactcaatctttaaatacactctcaaagctgttacgcacagctccatagtccaggtggtcaatttcttcctctcaaagatagaaagcacttgaaggacacgggattcaaaaaaacctaatacatcatacaagcccattacaaatatgaagtataacacaggtcattagtttaaaaataactaacagctgaaccatttatatttagaaaatcagtgaatcatgtcagtataacaaaagttatctaagaaaaccgcttatcaagaaactgatttataacatttacaaaatctttttaactatgcctacagaaaaatgaatacattttcaaaatctataggtgttgcactcttaaggtgataataaccgaatgttcaatctgtttcacagatctaataacaggagcagatgtttcaacaaagttacacagaggctccaaccctttattttcctagtgataatataaagttggatcgctatgctgatactaggcacctgatcattntactcttacacagcagtgtctaaactgttcaggccttaaaaatactaaagaaaccttcttacatttgattgtgtaccccttcccagagattaagatgcctaggtctagggt

SEQ ID NO: 58649 - DNA, 454 bp, Homo Sapiens
  misc_feature (282)..(282): n is a, c, g, or t
aaaaaatgtataatttattatatatgtatgtattccttaacaatatgttgtataacccaacaatgaaatatacatcaatgaaaatgacagctataaaacaataaaacttgtgaattctagagacatgttgagtgaaaaaaaccaaatccttagactacatagagtatgatacaatttttttgaagttcaaaaagaaagaaaactataaaataagtcactttagggatacatatgtattttaggtctttctacattcgaacaaatctattaaaaagagagcgngggggtcggcaaagataggagaagagctcaaatagataaaatacaagcactcataatgttattcttaagttaggtgatgagttattatgcttgataatttatttgcattccccatttacccttttataagcatcaaatattacatttaaatataagtcccaaattatgtata

SEQ ID NO: 58650 - DNA, 646 bp, Homo Sapiens
ttcagtgtccatatttcaaaaatttatttatctcaaactgtgcataatggagtaaaaacttaagttgaaaatgtacctgttataaggatgatattagttcaaatatatacatggattctcggcagactgattcaaataatacagagccgaatcttttaaaatacaactacggaaaataaaggggggaaaaccttaaaatatcacaataaatttacagaaatattacaaaccataagaaaatatttcaaacacagtaatttcatggttttttttatctgaacaaaaatggaaagtggggatcgaacaaaagctattataaattaccaacggtgtcaacctgcatggccatttttgcttttaacagtaagttataaaatttagtacagtctaaaacttttgccctttttaaacaagaccacagagatggttcgccagtacttattctaattttttccttttgtacaatttttaaacaattaaaatgtccaaatttgaataattttcttcttttcacgtttgcaactgtcctaaatttcagctgcagaatcaaaattcagcaagaagcctctccttgaaaaatattggcaaattctcagcttataaacaatggacattttgattgccatgtttatctcgataaatactg

SEQ ID NO: 58651 - DNA, 410 bp, Homo Sapiens
agagtatattatactttcaaactggatacactagaaattggcaatgcaacataagatgcaaaggaatataccagttactgtcaaaatgaccctgtacagcctcgtaatgcaaaaagctttatacaatacaaattttcagtaatgtacacaaaccttgacagtatgatcatctgaacataatatgaagagttagaaaaaggatagaagaaagaaagtgctgagaaccctaactgcattactatatggaaaaataagctagttttcattgaagaatgcatagtgacaacaattgaagttagttggtaggtgaatttctcaaagatgttagtgttttatacggaaaggatatctatggaatacatccttccctgagtatcaaactgcaaaccaaattcaggggtacatatttt

SEQ ID NO: 58652 - DNA, 506 bp, Homo Sapiens
gtgttttaaagttcattctttattctgttaatacactaataattcaaatcaattttaggaaaaaaaggaaactacagataggcataacttaaaaaaaacatcacctgtaatctcaccagagataatcaccatttgaccataaataacaagcaatctgtctcacttatctattactgtttaacaaccctcccccaaaacctcgtggcttaaaacaataatttgttatttctagtgagtctgtgggttgattgggatcgactgagtagttcctctgttttctgtggtgtagctgaggatacacccacattcagctgggagcttaaggctggaacatccaagataatctctcatcctcaagagtctctctccacatggcctctcatctttcagtaatccagctgagcttctttgcagcatggtggctagcttccaaaaaggataaaaggaaagctgccagtctcttaaagcctaggcttggacatatactaaatttcttctgctgcact

SEQ ID NO: 58653 - DNA, 549 bp, Homo Sapiens
  misc_feature (440)..(440): n is a, c, g, or t
gcttagaaaattcagctttaatggccccagcccttctgtctgagtctagtagtccagggcacagatgagggccacaccacgctttatccagtgtcgctggggctgatgggtggggatctccacagcaatgacatagttggtagagtgtcctgtggttgatagtgttccagcacgagtcagtgtcttgtagatggggcacaggtaaaagtcctggtcctgggccttgcggttgggtgttggcaagagccagataacggccatctctgtgtacagctccttgggctgagactcagccagctggaaggcctctggatcccagcgggcaccttccaggaataatccatggatatagcaccctacttggggtctttgtgttaactctgatggtgcctcaaacatcacccttgaatcaaaggagatggtgtcaatggagatgacanatttgcgggcaaaattctgcagagtgcctgttaagaaagcctgggggaagaagatccactgatccagaagacagctgggatggcatcttgatccaagcctgcagaagtc

SEQ ID NO: 58654 - DNA, 586 bp, Homo Sapiens
  misc_feature (482)..(482): n is a, c, g, or t
  misc_feature (496)..(496): n is a, c, g, or t
  misc_feature (512)..(512): n is a, c, g, or t
  misc_feature (567)..(567): n is a, c, g, or t
atcatcgaaataatttatttaccactagagcaccacaaaaacagacatacatcgtgttaaaatacagcgtaattggtcatcaaaatacaaaacagctaatcttatattccattttttaaccatgccaacgatcaaattgtactgctgattaacacaaaaataattgctgcccacttgcatactagcacttcaccccttccttcccacctccacccccctcccatggcaatatttacttatgggaaataaagaccttacagaacccccaaattaaaaaaaaaaaacagattcaagagatcttaaaatagagcatttaaaatattatcagtgcattcatgaggaaagacaaaataatacaaaacaaaatgtcatcctatctgagaggaaaatgtctgcagaaataaaagtgatttacacataatagaaaagtggaagacaaaaaaataatcaacacacactcaaatctgggattgggttacatncacacaagggctgnttactattatggcatnccatctcttgcttttccagttttaaacttgcaaatccaattcttaattaatgggnaggaaattccaaaaggaag

SEQ ID NO: 58655 - DNA, 596 bp, Homo Sapiens
  misc_feature (453)..(453): n is a, c, g, or t
  misc_feature (578)..(578): n is a, c, g, or t
  misc_feature (596)..(596): n is a, c, g, or t
ttttttttttttcagccaaattcatatttattccagtctctaacactctgttgttatgtctgctgtaagatgatcaggagttagtatgaagtattcttctctacgcaccaaagaaaacaaacaaagcaaacttcaagtcagtgaattagttaccacagttaaaatgcatttgattttgtccttttcctttttcacaagaacgacagctgaatactctttcatgtgatgcctgatatttttctttttctttttctctcttttttgagacagggtctttaagatggggtctcgctctgttgcccaggttggagtgcagtggtgcaatcttggctcattgcaacctcagcctcctgttttcaagtgattcttctgactcagcctcccaggtagctgggattacaggcatgtgcaccgtgcccggctaatttttgtatttttagtagagatgggggnttcaccatgttggccaggatggtctcgaactcctgacctgaagtgatccacccgcctcggcctcccaaaagtgctggggattaccggtgtgagccactgtgccagctctgatggtgaaaatttcnggtacaggcctagcccan

SEQ ID NO: 58656 - DNA, 598 bp, Homo Sapiens
gcggccgccggaggcatttggcctagcttgggagccgtagagcccttcctcaaccatcatctcagggcggcttcacgtcccctccacccacgcggaccgagctgcgcttcccttccccctgctcgggcccgcgctgggcgtcccagactcgacacttcctgaaggcctgtaatttttaattatagcagatttatgttgagaaaacttcatactgaaatcactgatttattttgggattacccaatttttttcctactattctcagatatctatcaaactactgctctgtggattcttatattaagtttatccttttctccatcttttctttcttgccacctaatgaaggaaatgtctccaaggtctttttgactaatagaaactaaatgtataactcgacatctagaagggtttcaagatagtagatatgtctgctgggatgttttgtcattaccctgcccaatgttgcgacgctaggagtttccttgacactacattataaataaggcccaacctgttagcaaaaatatcacattccctaattttctctcctttaactgtgtgtaatttatccaggcatgtctttagttcagtaaag

SEQ ID NO: 58657 - DNA, 600 bp, Homo Sapiens
tttttaaataataaatgaaagattttattcatctttgtagataacaagcactcaaaggttaatgagtgaaggagataaccatctcctccaaacaaagaggctcttaataacgcagaagcaaaaatctttccacttttagatgaaaacaaactaaaaaataacttcaggcttcagatatggaaataaagcaccatttttcaaatggtagacttggcttacttaaaataagtaaatagccccagactatctgaaaaagaaaaacatttcaatgccccttgtgagttctaattacatggctacatgttaaggaacatctcagatctctctctgaacctactagtaaacaaaaattatacagatatatatacaaatgtagtcttccatttcattttttcatttgcacaagcttccagctatttaaccaggtgacaaatcaaagtgacaagatgcactaatattcgtgagaactttaaattttaaaagctagtatttaattacccttagtgagctcatttacttacattaaaaattatgcgatcagtcatgatttttctttagaccatttaataatacacatggactaacatttatcatgctttg

SEQ ID NO: 58658 - DNA, 519 bp, Homo Sapiens
ttttttttttaaagagatgagatctcgctattttgccctattgcctctgctggcgttaaactcctgagttcaagcgatcctctcacttcagccttctgagtacgggactacaggcaggtgccaataagcctggctcaaatagaggctttttagcttgagactctatcctgagattttgatgtggtaggtctagggtgaggcataggcattttttaaaaagctacaaatgattccaatgtacagtttatactgacaatgactgaacagaagtcacaatgttagcacacacacatgaggaactttgaagtggaagctactcttggccacttgcattacttttcccggtctatcttttcaccttatccttctgggttctatgaactgaaagggttaaatcaggtagcacagaaatctgagatgtgcttagagaagggatggatcaaacattaaatagcattgtcctgataccactcaattcatcaggtacaaagtctctaaggcatggactctgctgtgttt

SEQ ID NO: 58659 - DNA, 601 bp, Homo Sapiens
tttttttttcaatcttaattcattttattctacaaaatgctactcaactgaaagtggaaatgctaacccccctcccccaaaaaaatcgcaggggaaagaagttttaatatgttctttcttccatagcagcaagctttttctaacaagctttctttagtgcaaatactgtaggcttgtattacatatagtaaaacaacaaaacaacaacaccaacaaaaaccaccaccagaaaggcttccaaacaaagctactcctcaattttcaaaactatacaaagattttgagcttgcggttctgcctggaaggtctatttaggagactctccaatgggaccatttcaccattacttaaaaaaaaaaaaaaaaaaaaagtgcccagaagggtaattaaattccccatagagccatatgaaccatatacaacttgtttgcctccagagtcttacagctgactttactccacgtcattaacatatctcaaatacagatgcacaaagcttattttctactatacaccaaaatactatatatatacacatctcccacggcagaaaagacaccctgataccctactctttacacaaagtcaaatattttcttcc

SEQ ID NO: 58660 - DNA, 484 bp, Homo Sapiens
tcagtttttatttatttttatttgatttttttttccttaagaatcatagtaaaccttagcagtagttgggcactgcatgaaaaatgaagtttacatagtttatattatgtacataaactagtgatttacattgatttacacatgattggtgcctaatttattaatcagcacgcagcatgtaaatgtgctcaaaagaaatcaaggtttaaaataagttttccataatattcataaacattttcgctggtgtaaatgttaaacctaaacccaacgttaacaccagcttccttgccaagagaaaagtgagatgtacatgctgggtgaaaacaaattctttcctaaattttggttggcgacatttgaacagcatagctacatgcaaatgagaatagtttacttcttttctgctagtatgcacataaatgtaaactccattttgcatttagtgagatgtttacagatattatgccaaccatgatggaaa

SEQ ID NO: 58661 - DNA, 577 bp, Homo Sapiens
ttttttgtggctaaagtattttattaaattaagtatgtaatttgcaaatggcttcataagaaaatttaaaagcaaatttataaaacattttcaatttaaaaagtacagagttaacagcaaaattacattttctatacagtacaaataaaaacatttttctgatatactgtctgaaaattttataatatattctccaactgatagctgcaatattgtattttaatgagaagcctcacagttaactcaatcatttattaataataagttcatcattggaccataaaagtcaattgctcaactttaaggaaaataatgaactttgtcatcatataatatgaagttataaacggctcttcaggatgtagatgtgttctagccttgtttctctattaaattctgtaaagaagcattaagtaatactgtaaacttgaattacattttaaaaataagcaccatgaacatacattctacataaacttattttaccttttaaatgacaccttttggccacataaacatttaaatctgttttctttacatgtaaataaaaattgagcaatatttaactactacaccg

SEQ ID NO: 58662 - DNA, 578 bp, Homo Sapiens
  misc_feature (210)..(210): n is a, c, g, or t
  misc_feature (212)..(212): n is a, c, g, or t
  misc_feature (270)..(270): n is a, c, g, or t
  misc_feature (327)..(327): n is a, c, g, or t
  misc_feature (461)..(461): n is a, c, g, or t
  misc_feature (498)..(498): n is a, c, g, or t
  misc_feature (500)..(500): n is a, c, g, or t
  misc_feature (528)..(528): n is a, c, g, or t
  misc_feature (562)..(562): n is a, c, g, or t
  misc_feature (574)..(574): n is a, c, g, or t
gtttttttgaattccagaacttctttattgtacataaaaatctgaatttcttaatatggaaaccaaaggtctgcaaaatgtactctcctagctcaggatcattatttattcctcttatttttggaatctattcttcttttattcaaggaccaactcaaaggtcagcttttagttaactcttatatccccatacacatatcctaaaggcananttaactgctatatccaagctacttcttggcatatccttgtcacctaaaataacagaanagggagactctctgaaaagaaaaatgatgttttattcaggaagtaggcattgcaatnagaaatacaagtgccacagttaaactatgtgcatatacagggaagtcaaggaagacaacggtttttaaagcaaaaatgattgttttgaaaaaaattatccttggctacaaggatcataacaaggatgttgccanttggacattggacagggaattgctgggcaaattttcncntaaaaatttttttgttttttttcaggtngtgaaggccttgttcaaggtttggtttggtcaanctttaatgaaancccc

SEQ ID NO: 58663 - DNA, 183483 bp, Homo Sapiens
gaattctaattctcttacaatgttgaaatctaaaaaaccatttccttcaaacactagtgccactgagaaacacacttatagaactccttaatcctccaaaaataatgtaacacatgcatcatttaattcaacgaggcagtgttattgtcatatagtgataaaattagtagttctatgccaaagaataccttgggcataggaggcatggtatttttttctggtagtcttccagaaaacctggcgtagcaaaatgacaaagtattgatggcttaatatcataaatatggaacgaattatatataacttactagaaaacagagtaacaatctaaataactcacgtttcttcaagagggacttaattccctttcctaatacctcactctataccacgctctacataaaagtggcttacatcacttgaacccaggagtttgagaccagcctggacaacacagggagaccctgctgctttttttgagagggagtctcgctctgttgcccaggctggagttgcattggagtgcagtggggcaatctcggctcactgcaagctccacctcccgggttcacgccattctcctgcctcagcctccccagcagctgggactacaggcgtctgccaccacacctggctaattttttttgtatttttagtagagacggggtttcactgtgttagccaggatggtctcgatctcctgacctcgtgatccgcccacctcggcctcccaaagtgctgggattacaggcgtgagccaccggggagaccccgtttctataaaaaatttaaaaattagccaggcatggtggcatgtacttgtggtcccaactacttgggaggctgaggcagggggactgcttaagcccaggaggtcaaggctgcagtatgatcgtgccactgcactccagcctgggtgacagagcaagagcacacatctaacaaaaaaaaaaattaaattaaaaagtatattactatctcagtgtaaagtaatgggaattcaaatctcaatgtcgattaatttcaaataaaggttgtggcagagacttgctagctgttcaaaacccgttttgtcttattcatgggtgcacagctagactagatttcccagcctcacttacagttagcgttgaactaagactgtggccaatcaaatgcaagtataataatgtgcattgtttcctggtctggcccatatgcccccaaagaaacaattctccacattccttacctttctctaccccagcctcaggagccatgtgttcaagaagaccggcagagccacaaaatggaaggagcctggaggaataaatatatttgattggcactgatttcttgcagtagctagcattagctttactatacattggttttgctttatttgttaacttatgtattgattcagttaaaacaaaaacacattgggtactcaaaacatgacagaaaacaaacaagtgactcaccctgaaaattcagcaagtaaaggaaacaatgtaactagacaaaaatccaatgatgcacagtcctgagtcctacgaatgaaatgtgtacagagttctggaagtttttgtggaaatgggagaatgaagctagcttaagttgattcttgaagtacagacaaggcaggggcgtttccaaacacaggaataagctcacgcaaaagccgcaaggtgtccgatgattgtgggccctgtggggatgcagtggtggcaagaagtaagggacggggctccatgtacaggcaggggagccgtaactgcaggcttggtactctcagcaacacccttcacacactagtaccactgcccaataatgttaataccactgcccaacaatgttagtacctttgctggggagactggactttattccgaaggcatttcctgaatggaaaatcacagtctggtaggcacagacagagttaaaactgtgatttgagaaaaacatccacgtaccaggtagagaatacacttttccccttaagggatgtggtagttaaggaaggcaaagaaccagtaataggtagattaagtttacaagttactggattattacatctcaaatccaaggttttgtacagatgacttttaacccaccttctaaaatatacccagggtaatcgtttccaaaaacgacatattcagttaggcaaattactcctttacaaatctagacacttcatcactttttatacatccctattagacattaatcacagagtatttctatctcatgtctctttttaaattcatattgaaggagagaagaaaaaacgaacagaaaggacaacaaatacagagttaatatcgcatctatccagagcttagctgtcaagcaacgatacgcaggagaaccatccaaaaagtgaaaaggtctctgacaggtgaagacagttgtcacactggctagtgactaaagatgtggcaattttcccataggaaaagctctcaaaaccttattttgatagtcaaaatcatgtgaaaatccctcaaaaccttattttgataaagctgtatagaaaaggtaagtatccaggtttttaaaaaattaagacttttttagagcagttttaggtttacagcgaaaatgtgtagaaagtatatatactcctccttcccaccctgatatatgcagttttccctactattaacctcttgcattaatgtggtatattttgaaaattcgtgtacgactatggatatatgattaacttaagtccattgtttacattaggattaactgtgttgcacatgctacgggttttgacaaatgcataatgtcatgtagctacctttaatgtcatacagaacagttccaccaccctaaaaatcccttgactaccaattcatctctctgttcctctcaccccctgccactctggaaatcactgatgtttttattgtctctatatagttttgccgtttccagaatgtcatatagatggaatcatatagcatatagccttttcacaatggtttctttcacttagtagtatgccagttccatgtcttctcatgactggatggctcgtttcttaccacgaagagtactctattgcatggatgtaccatagtgtccccattcaactattaaaggacatcgtgattgcttccaattttggccgatgatgaataaagctgctataacattcacatgcaggtttttgcgtggatgtaagttttcattttggtaaataactaaaagcttgattgctgggttgcatgtttagctttctaaagaaaccgccgaactgtcttccaaagtggctgtagcattttacgttcctaccagcaatgaatgagagtttccattgctttacattctcacccgcatttggtatgatgagcgtgtgaattttagtcattctaatagatgtctagtggtatttcactgttgttttaatttacagttccctaacatatctcaagcatcttttcatataattattttcatttgcatatatcatttggtattcagatcttttgcccattttaattgggttttcttattgttgaattttaacaggtttttaaatacattttgcttaatagccctttatcagataatggggttttgtaaagattttctccaagtctgtggcttttcttctcattctctaacggcgtcttttgcagaacaaaagttttaaattttaataatatccagtttatcaacttctttttcccatggatcatgctttttgttgttgtatctaaaaagtcatcaccaaacccaggattgcctatattttatcctaggttatcttctaggggctttataagtttaggttttacatttagggctataatctactttgagctaatttttgtgaaaggtataaggtctgtatctagagtcactattttgcaaaaatattcagttgttccagaaccatctgttagcaagactgtcccttctccaataaattgcctttgctcttttgtcaaagatcagttgacaatatttgtgtgggtctctagtgtctctattctgctccactactctatttgtctgttctttcaccaataccatgctgtcttaattactgcagttttacaataagtcttaaagtcaggtagtgactgactgttaataagaaaggggaaaaaacactcaccatagaaaggtacatggtaactcattaaatatatctatctggagagaaaagaagcacctagaagtcgaggctgctctgtcagcctggatgcatcccagagtgaagacacagcaaggcagggtactttgggcataggaggcatggtatttttttctggtagactttcagaaaacctggctttgcaaaatgacaaagtactgatgacttaatatcataaatatggaacgaattatatataacttactagaaaacagagtaacaatctaaatagctcactttcatctctaatgaatcggatgaatgccattttaagccaatgaggtttgggtttttgtttgtttgttactataacttagcctatctcagccatgacatcctgatctggaaataatttcaattactttaatgaaggaatgtcacttttgatctccaaatccttcatcaagaacagaacaaataagcatcagcaatgctcctataagtgtagccatgtaacattagacatggtagttttaagaaataagaagtaaaaccttgggctttggaagataaagatagggcttttagatagtaattatttagaagttaaagggcatctgcatccaggcaacagcttttagtttgaacttcatttaggcagggactcttactacctgagagagtagaatataacttctcacactactgtagggaggctgaagcatggacaggaaatcagagcagagggcaggcagagctgcgatacaacaccaagacagcaatttgctgacaatcagtgatgaggtgcatgcatttgtgaagaaaactggatgcaaatcactagtgagcaactaaacagactctgtacttgaagaaaattttggccactttcattagaagagactgagaaacccatgcaaagaaggtaacagattccaggacagacttgaggggaggaacaaaatagttcaggacacacgggacaatcagcagaacatcaaaggggcaagtagactggcctgaagggaatggtgtaccccaccagatcctttgtgaaaaacagctaaaagttaataccacatcccatactctgaactgtgcaattattgtgaatattcacatttcaatacacaggccacattttcaacaataatagagtaggcattggcaaaccagggtgtcagtccaaatctggctgctaattgtaaatgaagtttttctggagcactgccacacccacttgtttatgtattatctgtctgtttcagcactataagagagctgagtagttacaacagaggccaatggcttgcaaagcccaaggaatttacaatctggctctttagacagaaaagggttgctgcctcctgacctagagagtatggatttagtcattcaataaaaccttttgttgtctttgagaaacttaaagttttagaacacgcttctactacctttattttaaaggccctatctgtccaccaatgtcaatattcttgtatctgtaagaaatttaaaaaattacagagtgagttaatggaggaaagcttctgggatgctggtcttactctgttcctgatctggaggcccgggacatgggaatttccagtgtgaaaactcatcaagctatatacacttatgtgcacttttctgggtttttggggtatatatgtatactgtgcttcaataacatttttttaaaaagcatgtattacctcatcccttatagaatttcaataggcagcatgtatcaactacctctcacagactggactccacactaagtactgaaatgaagatacataaagcgtacagttacagagctcggcagagtagacggtcaatatatataaaagcacacaaataactatatactgtcaagtatgtaagctgcaggattcaactacaagctcgtaacaatctaactaaactagctcaggcaaaagggaaactcattggctcagagattccaagcaagtgttatagcaaactgggaacagagaagcatctaggccagtggttctcaagttaagatgatttttgccccgcaggggatacttggtaatgtctgaagacaattctggttgtcactactgggggagagctagtggcgtctagtggtaaaggccaggtatagtgttagataccctacaatgcccatgacaacccctgacaacaaagaatagtttggctcaaaatgtcaacattgccgaggttgagaaaccttgatctgagtgttactataagtgtggtctgtcgaaacagcagcttttagcagcatcttaaagtagatcaaaaattcagaattgtggccctaccccagataatttaaatcagaatgtgcataagatcccaggtatcccttgagcacatgaaggtttgagaagcaggaccctcagctcctaccacatctggagtcaggtaatgactttgccaggcatgtttctccctgcgtgacttctcatctcttgctgtagatgagattttgcctcacgcaggaatgttggctgctataggttactaagattcacgcctcgtatctccccctccatgcaagcggtgctgacttgcttctcaggtgctgagtttaccaaattttaggtggcttttataggtaccaaggaaaataatgggggtactataataaatctacctggatttgggatcaggaaagccaacgctgaaaaatttaagctgatttctgaaaaacaacgacagttggcaagcaaattaaggcgtttgtcaaatatttactaagcacttactatgttccagacgctgttctggacctaggaatgtatcaatgaaaaggacaaagccctgatcctacccttgaggagtttatattccactgggcagaagcagacaaacacataaacaaagagaaagcacaatacagttgcagaacctgataaatgctgccagggagggaagcaggcaaagcatctggagaataaaggatgatgtgacagaacacctagggcccaaggacaaatatgttaggaaggactctccaaatgacgttaagatttggactgagacctgaagaaggagttagccaagcaaccaggagaacggtattctacaaagacagatcggcacaggaaaaggccctgaggagtgagagctccacaagctccagcctaagggcagggttgagggggtgggggcagcaaagaaggggaaagctgaaggtgcaggacgagggaaacagggtcctagcggttagttgtaaaacagaccttcagcaggagagtgcagtggttccaactgaggcggctcctggctctggctgcctcagtttgaatctgggatttgccatttataagaagcgtgacaaggccaggcacagtggctcacatctgtaatcccagcactttgtgaggccaaggcaggtggatcacttgaggcaaggagttcgagaccagcctggccaacacggtgaaaccctgtctctattaaaaatacaaaaattagctgggtgtggtggcgcatgcctgtagtcccagctacttgggaggctgaggcaggagaatcccttgaatccccaggaggcgggggttgcagtgagccaagattgtgccactgcaccccagcctgggcgggcaacagagtgagaacctgcttcaaaaaaaaaaaaaaaaagtgtgactatttcttagggttgtgaaaattataagtaaatgtcaagacaccctacaacaggagtcagcccaatctggcccactgcatgtcttgtatggcctgtgacctaaggaagttttctgtttacattcttaaatggttacgttttaaatgggcgtataagtacctacttcatacccttgattctgccccttaactccacaaagcctaaaatattgactatgtggccctttacaataaagtctgccatagccaagcctgtacacggtaggtgctcaggacgtgagggccaacactgccagctaccatgtcaacggatatgactccctggccaggcattacctgaggctttttacattatacttccccaaataaccattatcctaatttatagttaaaatgcaagcaagtaacatggaacatagaattttaattctagaattaaaacccaggtcactatgtcccaaaaacccatgatctttcagtctctcatgaaaatcacacagttaagccctctattaattcgtcctccaagctaggtattgttatcccctgtgtatctgatgccattatagcttttgatagctgagatagtgtaagtaggacccaggctttcacttctgaagccacttttgaagccagaaatgggaggtttcccagtgcagctcttaacgttggcgcatgcaaagattctctcttgggctcagtgaaagacagtcaagatgaaactgaatgaatttgtatcacagtgctcattgtatgaccaaagcaaagagaggattggggataagaaaagggtgtagctgatattgagggtggtacttaaaccaatttactgtccctctttttgcttttattcccccaatattctctagtaaatgttactttggtaataagagaaaatacttatttttataaagaaagaaagcagaaataatcagccttacccagagtagctacattgtactttttaaagacagcactattttgacagccaaaaaagacacttaggaatacagcattacaaattcaagatcatgtctatgaacttggcttgaaaaaaaaaccctccgctaaaatacaacctaccatctgtacaatgtattcaaaaatgattagcatagtatgaaaaaataatgctggaacagcagatttttttttttccattttttaagaacgcttcctgctcggtattattttcagattcctccatgaggtataagcaaaggcaaaatggaatctcaggtcaagaagatggaaacagaaagtaaacagagacaaaaaaggaacattaaatactctttactgaagatgtgacactgctctagaaatttcactgagcccaagagagaatctttgcatgcgccaacgtcaagagctgcactgggaaacctcccatttctggcttcaaaagtgaaagcctgggtcctacttacactatctcagctatcaaaagctataatggcatttctctgacagcaggactctcacactctcatgtcactaaaagtgaatcagcagagcttgcagatgcatggagcccagaaaggcacctctcagaagagggtgtggagagcgccggggcagcgtggagcacgatgatggccacagacagcagtatcttgccctgactttctcactaaccagggtgcctttttgcagaatctctcgactcctgaaatccttactaaaaataagggagttaggctgagaagccctgtctaaaagccattctatgcttctgtgatcttaaatcatgaggtcattttcacgtttgtgtaaatacatcctaacaaagtgaaacccctacagtatgttttgggaaattgtatccaacaataaatgttcagaatttttccccaaatgaacaaaaaattgagtatcaaatttatacctattagagaatatttaccacattggcagagtgcctcaaaggacttaggaatgttctatttgcatctgaaaggcaggttgcatgagttttgctcctatctcgtcagtcagcactagaggatgcctggggatgggcttctgcttgtaagaaaacttgtccacacaagaggtgatcaagagagtgacctccagctgcctaccgcatacagatgcttggtgcctgacacagaacttcatctccagggcctgaagagctgaatcaagccaggagacaatccctggagaatttaaataaaaaaaaaaaggtgaggtatgagctactgccagcactgctttccttacttccttctcatactctgcccctctactctcagggtacacaagccctcaaacttgttttccctccaacagggcccaggtggtaccttccaagacagaggaaacctgtggaaaccctagcataataggaggctttgttcatgatcattgccgatcacctctacactatctgcaattttagaaaacgccttaattggctgctggcaaggtcaaggctctaaggctggcaaacaaagtgctcgtttaataagttggctttcttcgctctacagagaaaagacagataaattcacacgtgggacagcatccttgccaagaggtatctaagggttagatgtgctggacatgtaaacactagcatgtttttccatagagtgctaaataaactagcacagaggtcagcaaactttctctgtaaaggaccagatgataaatattttaggttttgtgggccatatggtctctgtcacaactactccactctgctgttctagggcaaaagcagttatagaaaatacataaatgaatgagcatggctgtgttcccataaaagtatttatggacactgaaatttgaatttcatgtaatttttgcaggtcaaaaaatactcttgatttttctcaaccatttaaaaacataaagataattcttagctcgaaggccatataaaaacaggagtctgtagtttgatgactcctgactgagaggatgagacaactcatattctgcatcttaccacagaaaatgcaaagtgcagagtctttcttcacaagctcggttatactcaatttatccctttcccttcccaaatccaatcctccaaaatattcctccaatggggtccactgtctccatttcctttgtctctgctcccatcatctctcccatggcctccacctcatctggacaataatcttaccttcaaagcagtcaccacccaccagagtgaagggctttgaagagaaatcatcactccttaaactccttcaatagtcaacagcccaccccccaaatataatcagaatcaactctataatctgtgccaagccttgcaaggccctgcctctctaactttgtaatcctctccttgtctttgactctatgtgatggttcactgtatgtgtcaacttgactgccttaagagatgcccagatatttggtaaaacattattctgaatgtgtctatgagggtgtttctggatgagactaacatttgaatcagcagactgagtaaagcagattgccctctgtgttagtcagggctttccagagaaagagaaccagtaagatggagattatacatataaaatatgtgtatgtctgtaatgagataaggaatgggctcacatgattacagaggctaacaagtcccacaagtggtgcaaatgacaatctgaaggcctgaaacccaggggtgctaatgctgtaagtcccagtacaaggaaagaagactaatgtctccactcaagcagtcagattaatgttcttgtgccattttgttccagtcaggccatcagtgggttggatgatacccaccctacaatggggagggtaatttgctctcagtccaattacaatgacaatctcttccagaaacagcctcacagatacacccagaaataatgtttaactaggtatctgggcatctcttacattagcccaactgacacataaaactaaccaatacacactccctaatgtggatgagcccatcagttgaagccctgaatagaacacaaaggttggccctctagtcaacaggagaaaactccttctgcctgactccgcctgcctgactgcctttgaactacgacattgactttttcctcccttcagacatgaacattggctccttctgggtctcaagctctcatgcttctcaagcctttggactcatattattaatacaccattggctgtccggggtctggagcttgcagactcaccttgcagatcttgagatttgcccacctccataatcgtgtgaaccaattccttataataaagtcctttatacataaaaacacaaaaatgttttatatatatggtatatatctagatagatatgtatctcctattggttctatttctctgtgtaaccctaacacaaccatgaactgtcacatcatttttctcaaacttcttcaaacacattagggcctttgtatgtttcctttttcacaaatgtttattactatgttgttaccttctcattcaagtctcaatttcaatatctcctgccctaatattctttgaaaaatggcttcctctcacccttcaccaatgattctctacctcagcctcttatttttgttcccttcaaaacccttatcaaatctataattatttttattacttactcatgcctgtcttccctgaatggaaggtaaccttcatgagggtaggcaccacatctgtgttattcactgtatcctggagccctagggcagagcctgtcacagcaacttttaatcaatgttgcagaataaagaatagcccagagtttacagtccctgtcctcttctttggaacttccatccactttatcagataatgacctttgcatgaacaagatgatgctggtgatgataaagacccccctgtaccctcccccagtaaagtgatgcttgctcccctataccactgtgaagtcctctgccatctttatgctattcttactctctggactcatcactgaaatgaggacttactctcacaggggctgtgccttactacttaactgggtattcacactggtgattcaggttaacagttaagtcaccacctcatgtgacgcacagcagggacttttccccaccaccaacaccaggctacatgcagcttgaagctctgggtactatgataagtctcatgggtttgctcaatgaactgacttatccattccagttcctctgcggcacctaaatcagaataaccctgggtaacaatggtggatcagtggtggggataaacattaatgggtacaacctttaacaagagtctatgcttagaaatggaggatttgagggctaatcggcttcacctttccctaataaaaattatttttgtactattattcatagctacctttggctggttccacccaatcagtgcttgctatctgttcctcacactggacccatgaggagagctcttatttccacatagcacggaaagcaaagtgaaagcaggacaggaattcactgattggtctgtggtcagttcgtgaagctgatgagcttctcactgctgttgttccactggtgctctgattctctcctgcttcacaaaaggcaacaggaggaacatctttaactcaggtagaacaatctgatcttggtgcatgccaccacctaattgaagataaaataacctgtcagcactagttacgtgaatttgtctctatatacctcaaagtccccaaatgaggccaatcacagttatctgaaacctgccagcaagccagggaactgggtcctgggaaatctttcttgactatatctgctgtatcacaggaaactatgtagaaccttaaaagatcttcagactgtatatgcctgggatgatactctgctcacccagttcctgactgcataaaatgtgactggagtgtgaactatgttcatttcctgtacaacagtttttcttaccaagtaaaaagtcccctcatacctgctctactgaaaaaggcttaatccttttcacttcgccaatgtgaatttcatgctgtaatgggccaagttttggaaaaacaaagcagttgttttatacctgcccaactttctgttcacacaggtgaacaggactatcagtggtgaaatctcgccaacatctctcgtaaaagatccttgatttaacaatgactgacatctgcgcactttcccgttgactataattctcttcacaaggccacaccttgcggaacaaactttaaaagagcaaccagtgctaaactgcaggcattcttctttcctagctccagacatccctatctaggctgtttatttttcagctttctaatataatgttgggttgatatgtctgtcatatgacagcaagaaaaccaattacatgagtcacgctctaaagtgatcaaatgctggccagtgaagccacagctgcttttgattcattagaaatacattttccagccctgcatttttaccaggcaatgtagttcagctggtattgcagtttttatataatacttctttatttgattcaaagtacatatttgtaagatattgctaaaaagtcacaaagggaaggagggcattaattgtgcatctcctaaagctttatttccacaatatgtggtaagtgctagaaatgaagaaatgtctcaatttgcctgaaaacctccaacatggctttctaataagtaagactacagggtaaatgcattcctcagcatttgactagtgaagactcccacagctgctaagattaggtttctagcaggacttcccactctctcctcaattgcatgagtgaaaaatacaatggtctcagcttgattccaactatactttatttcctgaactgacactttggttttctttaggatagagctgtttagagtcaattgtagcaataaaaaataatgacaacgtcatgaatattcttactgaaaagctgctgcaccttgtttaggcactgaatatactgtcagtctgttcaaaaatagaggatcacaacagctgactgatgtagcaagaaatgtctatcttaacaatcagaaaaggtggtcattttccaaagtgaattcatcatgtggatagtaaaaaaaaaaaaaaaaaaaaaaaaaaaaaaattctatgaccaaataagtacacggtgtagagttaaataaaagttaaatgggttacttttccacatttctgagcttttaatactctgacatgtattatgaatttaaaataatttcttattgaatttttcttataaagtgcaacagtttgtagggctagtcttccacagagctttttgaatcttcggaataggccacttaaaagtgtctgaaatattttactgtctttcctacctctctctgacactcatacacacactattccacctatcatatggatattttatataatgccatgtattttatatgcttctatgtatattacaacatagtaaagcacaatgagcatgtttcacaatgctttttggcataattactatgtttcctacctggatgatatttcaggcaattctggtaagggcctttttcttcaaaacacaaggtgatttaaccaaagcatgagtgaacaaaaagaggggatacacagaagtgtgattgccacatctgttagcagtgcatttggtaagccttcccctgtcactatatatattcagaaataatgacaaaaaaatgtagttcctctgggcaaatgaaacggaggtgcaaattagaatcacacctccagtctcattttggtatcacttcttgtctggataaacaacacttactctcactctcctactcatggcaagtagccactgttaacacttgcattagggatcagtcacaacaaattacagttaagtttcacaccacactgcaggaggcagcctgggcccaggagagcataagagcaaagctgggccgcaggaccaattttgagaaaactagcgttggggctgaaaaggcccctgtgcctcagccacatgaagtggttaaaattctaatactctaagtggtatcttaatatttctgtgtgtagtgattcattattctctgtggagagtaatagtaggtagctgcttgcaaaaagggtgattttgatcaccaatcactttcaagaacacaagagatcagtggtactcaactgtgaaagcttcattataatgggaaactgcctgtgtggattaaaaacacaaacagatttcacttcaagatgattgtgtgagatgctaaatttccatgatgtgaaaagtatctacagactatgagccacataaaagtatccatggggaagatgagaaaaatcaggactagagacccagttcatacatgaattttccctacctacttgtggggcagaagataaaaggagctttgtaagctgtaagttggctagtttattgtttatccaagtagggcaaagtccacttttttgagtgaaatacaaaggtgaaatctgaataagagtttatagaatgcatacaattaatctccactaaataacaagaagtaaaataaaatcataaacctttaagaaacagggaggggcatggtggctcgtgcctgtaatcccagtgctttgggaagccgaggtaggaggattgcttgagcacccaggagttcaaggctgcaatgagctatgatcatgccactgcaacccagcaccccagcttggatgacagagcaagacctcgtctttttttttttttttttttttttaaagattcagcataaatgtgagaaataagtagagctaaacagtctttaagtgaagcaaatacacatgaattcattcactatcagacttgctccttttggaggcatattacttactagggcacctctacgaagttttctgagggatcctgacatctcaagatgagggagaaatcagggtgctttgtgatactgagccaggtggtcttctgagatcggggaacaggatttgtttgataatttagtaaattaaggtgggaggtattttttaatgtccttcaacaccaagtaaaacatgattgggtttatgatgattgtagttctcttttccataaacttcttgttgatatgatttaggtatctgccagcacctccagaagtagagaaaaatcattagaatgtatcatttccatgtcccctcatccatacactctgggacatccattagtataggtgtcctttgtgatttatgagaaattcttatgggaagggctccttgtaacccaatatccacacattgctattataataactctcaataatggcatctgtcatgtgccaaacatgacactaagtactggatatgcatcattatctaccccttcacaacaaatttctaaggtaggttttatcatgttcattttacaaatgagcaagttgaggctcaaagatgtaaattaagttgttccaggtaacagtgccaagaagtaaacaggacagatttaatcctgggtggtttaattctaataaacatctgtgcatgcttttattgagaaactactaggtataatgagaaaaacaggcacaaataatcaagacatatgtggtcaacgtgtcagaagtgtgacccactaaccatgatacaggcactacaacagattttagaccaacagggaaggattcagaaggtggtatttgaagtaaagcttggcggagagaaaaaggttcccttttctcattaaaatcctactctcccttccagattcatcagggattcctaagtgcaaaaaggacatttatgatgaagaaaaaaatgtaacggggtggaaaatgaagctcacatttatgacacgcaaactgcctaggttggctgaggttaagcatgtgaaaggaaccgtgtaaggtaaaactagaaagacgagattgagctagttttgcaagcaagaattctttggaattgtattaaaccttttcgacatcactgacaaactccatcaacatctatacttgcattttcttgcaagtctcttcattccagttccataggcattttcctttcctcttacttggcttactccaaagtcacttaatatcctagtcctcttccatctctcgagttttccttcaaatacagctcaaactaagtcactactcctcatctgcaaacctgccctgacattgaacattcatgcacctctaacttggtcccacgccttctctaccaagttctggctcctattcatatctgtgagccttgcctctcactattccctgccttgtccctaactctagttaaaagaactactggaaagttcttaactctcatatattctttcttacctctgagcctttacacaggaccacctctgcacatggcatgcctctccttgctcttcacatgtgcccagctaattcccccttatctctgagtatcagttgatacgttacgtctgtcaggaagatatgtcttgtctctcctcacatctaaggtgagctcctttgctttctacacaccctgatctactcatactcaccattcagtattgcaaatgcttttctacttgtctttctcacttattatcttaagcagctactgagctactgagcgtcattaaatcctgcaatctcacacatgaaaaaatgaactattttccataacaggccaatactactgaattcactcatatattactcatttttcacaactcttcttcaaattctgaagaaaaatactaaagatgaaaactgtatcttcacataattttttcccctctcttccatttatttcctcttcttagagatacctacaccttagatattggccccttcgagggcttaataaacatccatcagtatgagagtgcaataagtgagtcaacttaatatacaaataagtacgacgagcgactgctccatggaccattttcatgagactattacataaatttcattaacctcagttggtaccgagaagcacacagtccactggactaatatgggagaaaataagtcagtattcatccctctatgtcactgcatttcctcacattctctgttattcattcagtcttctctgttgtttgagactaaattctcccagtgaagacaagctctcgagtgtgtttgatgcttccacatatctccaacaatgagaggtttaagtggggacgcaactagtcacccagttgttgactcatccaatcaaagaaaattaactgataaaacatttataatgttaatattgccctccaatcacctggtaaagaggttagtgcctctccctgccacatattcctgaacacaaatccaaaggcaaatactagacatatcaaacaaggcatgcgcctctttaaactgggcagataaaagcagaactttcaggtgggcacaattagcaccctcccaagggagaatagagagaggggaaatgatgcaaaataatgcagaaacacttaactggtattcacattctagcttgcaaacaatttctaattcacttgcctagacagttaaccatcagtctggatgtaaagaattcaaactcaaccaagaaacaggaagcataagttctgtcacaagtgtgtttattttggtggctcacatctgcagctttttccccctcaatgtatttttttcagagccaaacgaggaagggaacaaagttactgggcctaaatccatcactgtgattgtgatatgctgaaccacccacagcatcatgagaaggaagctattagtttcatgctgaagaactccaacccacataggggcagaatctagaagtaaaggaacagtctattcagcatgattaactttattcagtacacccaacaatgtctaagaactgatctagtcacactcgatttaaaagcagcattatctaaggggatgtgttccgatggatgttccaaggtacctggtgttccactgggagtccagcatcagcatgagatcttttggtgtcatcttgcgttgataacgttactgctaaatcactacaactgcgaatagagactgaacactgtgtaggtgcagggctaaactatcttaaaccaaacttacaaaaccaaagggtgcagacttcacaacagcagccttgtcaactgcatcgcatgaatccaaatccttggatgggaaaatctcctatacagattgagttcttgtaatccagagaaagggtcagcaaactacggcctgcaggccaattcctgccagccactttttttgtaaataaagttttactggaacacagccacaataactcatttaaatattatctactgctgcttttgtgctacagtggaagagctgggtagttgtatagagatcatatggtccgcaaagcttaaaatattacctggctctttacagaaaaattttgccaatccctggtctagaatggtggagcattcactaattcttgctctgcaaaacctggttctaggtcaaaattattttgtcttgatgctgtaattcctcactgaagatcctagtacttaaggccttgggttggcccacagacatcccaaccctctgcttggaaacactataggaacaggtccaggtggcaaccctgcaaatctgaacagatgcctatttttcttctgcccatgagacagatggtcctcagagagggggagaagaattagtccatgagagagaattctctgtgcagcactaattttggaaatgtatccctgatccatctggccaaagaggattccttaggagtacctttgctattcgggtttgctgaacattcaggaggggaatcctaagctccaaggctagaacctcaggtatttgctctctatcaaaatgttaagtaaagccctttagacaagaagtctcaaataattatgacagaagatgattataaggatgaagacaaggatagctgactactcattcagggactccttttcagagaatttcttcaatttcccttggcagtaaattttcccttagatgaaaaagataataccctgatattctgctatgtacagaaagcaggaagaacaatactttctgaactgctaacaagagtagctctcctctagatataacaatgtttctccttctcattaaccaccttaactcatctttgatattcagaccttgttattctaaagaatatttccccgcggaacaaaccataaatttgcaaagttaattaggactctgatcttaacgcatttccccccatttcattcctaacgctctgccgggggtgtccaagggagaggaatacagccgtgggttcttggtttctgtttctggttgagccaataaagcctcttcctcatccctcttttccgcttatcactagagacataatagaaaaactatataaaaatagaaggaatgtcttaaactccttttcccttttataattagttggcagagagacatttaaagtgtgcatatacttcaggaagacaccatataaatatgatttttatctaggtatgacatggcttcaggctgctaaaagcctaaaacaaaacaaagcaaaacaaaacaaaacagaaacaacaacaaaaacaaaataaggcgggttggacaagattgctagtatagcaggagtgtccagtattttggcttccctgggccacactggaagaagaagaattgtcttgcgttacaataaaatatactaacactaatgatagctaatgagcttaaaaaaaaaaaatcgcgcaaaaaaaaaaaaaaaatctcacgttttaagaatgtttatggatttgtgttgggctgcattcaaagccatcctgggctgcaagcggccccacaggttggacaagctcgccgtagagggttggttctgttcagctccaggtaggaaagagacaatattaagatcagacataaggggaaagttaggcaactagaagtagaggcattaagaaaagcaactgctaacagattctgatcattcaatcttagccaacaggcttttgaagtatgatggacttgggtgtaagtgaaagagttgagtagttgtatagagaacatacggaactaccacttactacctggataatctcagagtcctcatctataaaacaaaataataacgtagttactggtgctgttattgtgaggattgaatgaaaaatgcatataagtcatttaatagtgcctgagtcacaacatagtaagtccttaataggtacctaacaatcattactgagcaaagttcctgctaaaagaatagttgctgttagaagcagaaacaaaggtggagcacagaagaagtcacaagggaaaaatatctttcttgattttcttctgagtcatatacttggagaaaaaggaaaattcttagtgcttttggtcccaaaaccctgtgtagcgttacctgtgagcctgacaagatccttcatccagtttcaacatcaaggggaaagaagatgctgcttcacataatgcaggtctctgcagacgatgctgtgccacaggaatcaatcaagaaatagttacatccccagcattgctccgtgggttgtaaaataaatgtttcttagacaaagaaagtataagtagctgaaacattaggaaaataatatcactgatcctaacacggtgaagtacttggcttaaattcagccttacaaggttttcttaagaatatactattggtttacaaaatttaactcagtatttttctaaaattgtaacaccttctacgtgaggtccccagacacaggcacaagttgtaggaacagagaccatggcaaataataaaccaggaaaaccagagttgacttcatgataaccagggtgggaacaaaattgacataggtctctataaatgaaaaccaatacttgatttgtaactagaagcaaatgggcacccaggacagacaacacaacacagctgcgatgacttccagccactgataatctcataaagctcacctccgtggcaactccctgaaagcaaatcaagatcaaccccgctcctctcggcagatgcttctttttccaagttccatgggtttaggttacatctgagctcactttcacgcatgttgcgagctaattacaaagaatccagaaatgtgggaacaaactgggaatactgtaggctgtttcagcaaaccttagcaccatctgctgaaatattaagatgcttgtttaaaaagttggctgtcagagaaggaggtcacagcacagacagtggggaagttctcttaaataactacttcttacttctctttcctgtatacaagctgtagggcactgagccaaaggtgaaccgtccagagaaagaagaccgtatctgctaacttctcctggtccacgtgccagcaggagagaacctagagcatgctggtcatcaaaagagaagagatacggtcaaaagactgtagcatgtttgtgcatttcagtgagcaacaacagtcatttgggaaaacagaatggaacgtcttaaactccttttcccttttataattagttggcagagagacatttaaagtgggcatacacttaaggaagacagcatataaatatgattttatccaggtatgacaatcccttagtaatctgagacttgtgagatttggggattccctttgtaggttagatgtttctctcagaaacagagcagctgaaaagagcctcaggtgtgtagacagtgatcaagtcaatggttagagttccaacgggcttagggaaaacaaaagaaagccttgcatcatttaatgtgttgaaaggccccaacagaatcacatattaataataataacagcagcagctaacatctttcgagcatgtaccaagcattatgttaatggttacatctgttatttattaagtcttccagcattctcaggtaggtactgttgtctcatattatagaggaagaataaagatgctttcagaaattaaagaacttacaagagctcatcagtttggaacggataaagctgttattgaagcttagctgctgactccagggactaatttcacttgtaactatgaaactatattgaccatggactgagattcatgtaaggccgctcacacaagggagtgtcatcataaggatatgagtggtaaagtggaagacaaggataagagcccaaaaacatgcttcagggagacaataagtggagccaaagtaactagaaggatgccaggcagcacaagttcatgggtcttcactcctgtgtatcactattactgacacagctactctgcctacctgctttcccttctattaacttgtttctgttctctgtaactggtccaagtcactcattgtctaggctacagattggttgtcggctgagttaggtagcaatggttcaattaactgaggccaggtacaagagcaggggcctcaagggctgctgagggccccaacttcagctgaagttatgggaaaggcagatacctatggaaggagccataagaacagtgggccccatgctgctcatgtagtacagaaagcaattctgcatccatgtttgtaatctgcctcacattttttggcttttacagagattgtttatatccaaaagggcacacgggattacttttcagtcccagcagtctatgtgtagtgactacatggatacaatagtatatacatacgtgaagatctttcctactaataagtacaaagagtactaacaaagacaggttacttatggaagggtttcctcttccttcttcactctgtttgtttcaaagtcctgtttattagaattaaaaggtgcatggtcctgatttccacttaccaggaggctggtcatttttcatcattacgtagaggggtggctcccagtttagctcaaccatctgtcgtccctcgcaagcctgagagattcacagcaggaccagtagagtttgccaaccctctcaagcaggctctgagggcagggttgacaagttacttcccaagcctgggtggaccagacaggaagaacagatccatacatatgactagacagagccagacacgcagggataataggtcatcataaaagcaaagttggcctccagaaagaagaaaacccaccctgcgacaatcactatcaaaaccacaggtattcacacaggatacttccatcgaactccaaatgtctctagagcaaagaggttaaaaatgttcttgtggtaagtaaaacctccttttcatgcaaacaaaaattaatcacataaacattacatggtgacataagccaaaagatcaacaaagctttacagtaagtaggatcaatccactgaaaagaataattaatgttcaaataagcagggcattcatttttttttccctaagaaaattaaactctgaagatatgggttactgaatatcattagatcagaacctaactattaacacacttcatccaggtggtgctcagctccacacagcttcctgctggagtcagcttagaaaggatgacgggggagtgaaagtaaaggcgcagttttcggccctttttatgaaatgttacaatcctgaaatattccacttaacttctccaggctcttttaaatgcacttctaacaaactggtaggacaggtgtgagaaagtatatgaggctcggagtcaccaggagcgagtttacactcgctcccaagttctgccatttactagcctttgttacatccagcaagtccttcagttctcttgagattcagattcttaccttctcaccccaatcccaatgagcatcttagcacctgccctatctatcacgagattctgcagatcaaattaaaacgtatattcacagctttacaaccctgaagtagtcatcaggcattttcatttttaatggtggcatggactcaaatctcttttacccagctttcaataaaacagggtacatggtgagaatgggttccagaggccaggttaaaaccccaaatttaaatcttagctctctaaataaatcttggcaatctacttacactcttgtttcctcagctgtaaaagcggaagacacaactcattttgtagaactatgaggtgctgcacacgaggcggggctaacaatggatactaaatgaaatactggttttcttcttctaatcctgtggtgccttccaactaaatcttctgtaattatccaatggctttgtggtattatatcttaatatataatatacaatgttcaaaatgaacacaaaactgaagatatccaaccttttcaattcttatattgttccaaaaagcacacctttataaactgaaacaaaagaaatttacaggcagtaaagctttaaaaatcctgacacgtgtcatataggaacgtgctctcttagcagttactttatattatctataaatgacttactttttattacaggagataagtgaaaattaagggcaaatgaacaaaacttcacatacccaggctttacccaaaattctaaaaagtagagtttgctaaggattgcacccaccacaagtaatgaagcaacttttttcccttctattaagacataccaagtacttgatgccatccagagaagataaataatggtttaaacattacaggaaaaagatcctttagaaaaacttacttttggggtatttttcctgtgccactgctatattaagactttacaacacaaacaagaatacgtatcaactcaaaagaattttcattttgacaagaacacaaacatacctattgaaactcatccaatatccaaatcctcctgtttcctcagtcttacagatttagcagtcttacaacggtgagggccagtacttcctgaccacactgatcaaccgaactgtttgcaacccctcaaaggtacccgtgctctcagcgtataaacacataaaaacaccttaaggcaaagtaggaggtggccaagccttggctgctcaagaactgccctaaatcaattttaaaaggaaaaacgaaatggccatgtcaaccgccgggttctgatatgtgttggctgtacttggctagagaaatgatggaagttatcaaaattcttagaaagaagtagcatttagaaaagcagagatgtgcaatttgttttttcttttccatggacaaagacagtaaagcccctagccaacccattaaatggttaactggaaacagttcgcatattattcctctggcctatttctctctacacagattttcacctctagtaaccacagaacagttttttccatcaaccatagtcctttgcagagtaacttttaacaaataaatgtggaactactgtagactccacctccagcccttagtaaaagtaaccagaattggttgcaaaggatctgctacagtttgaatgtcccctccaaatctcatgttgaaactcaattgccattgtgacaatataataggtagacccattagggagtgattaggcattgacagctctgccctcatgaatgaattaatgccgttatcacaggagtgagttccagatgaaaagcaagtttggccttctctgcccttgttctcacattctcttgccctctagctttccaccatgggacgatgcaacaagaaggccctacccaaatgctggtgtcatgctcttggacttcccagcttccgcaaccaagataccaataaatttctgttcattataagttacccagtctgtatatacctaaaggaatataaatcattctattataaagatgcatgcacacgtatattcattgcagcattattcacaatagcaaaggcatggaatcaacccaattgtcgatcaatgatagactggataaagaaaaatgaagacacacacaccatgaaatactatgcagccataaaaaggaatgagatcatatcctttgtagggacaaggatggaactggaaggcattatccacaacaaattaatgcaggaacagaaaactaaacattgcacattctcacttgtaagtgggagctgagcaatgtgaacaaatatacacagggaggggaacaacacacactggggcctgtgtagggggagggagagtatcaggaaaaatagctaatgcatgctgggcttagataggtacagcaaatcatcgtgggacacgtttacctgtgtaacaaacctgtatatcctggatatgtatcccagagcttaaaataaaatttaaaaagaagttgcccagtctgtggtactcagttatagcagcacaaaatggactaagacacaatcttaaactaattgagttcaaccacctaaacgacacttggaatatcccagccctggaagacatccaaccaaagctgcaagatgtccagggaaaagacaactcccaatgcacataccccaggcctatgaaatcactttttgggcccaggaatctatgtatacatgtttcaacaagccctctgggtcaatcttaagaatgctcaagttcaagaaacactgccttacatcacttcttctcaaacttaaatatgcgaatggatcaacctgggacttctgttaagatgcagattatggctcagtcgtttaggggtagaagctattataaagtaagtttgcatttcttacaaatttccaaaagacatcaatgctgctgatccatgggccataattagaacaacaagaccttgagaacagagtccaggtcttattctatgtactataataatttattagcaatctactttggcaaccaagattatgtcatgttgaaggtgatatggtggtaagtagttggaacactgtgtgaaatactgcacattttatttcaggcaagtccatatccttcatgtttatgcacgtcaatttagatagcaagtgctactgtaaaatgtatttgaatacttttaggtattatttcactcatatgatactactcagtttctaaataatagcttggtacatagaggtctgtggttctaatcacacagagtgctcaacattggtcaagtcaatcacttttcctttaccagagttccttacctgccaaatgaaggcatttgcatcaactaatccacaaggcttattactccttatgggtccaacagcatgcatgaacaacaggaaacagcaaaaacagaaatacccataactgctaccgaggtaattttctacacatacaaagcagttaagataattgcctatcttgccaccaaaagaacaaatgttttgtctctgaagacagaaaaataaagattttaatcaaagattttaatctgaactgggttccattaaagcttgcaagctttcttacctgttagaggctcacataccgcaagacaaaagggaaataatctgggttctactccaaaaagtctgactctgaccatgctttagtcaggatacatgctttcgtctttttcactcacttacctagaaacagataactcatctttccatcttattctgtgacgatgaaagaagctaaaccctaacccctaaccccttattccattagggaatatgtatctttcagaattacgaaaattagtaatcaggtcatggtctacattcagcaaaggaaagcaataatgacaagacagttttatataagagtctgatactaagtcagagaaatatctgcccaagtacacccaagaactccacatgcatgtaacctcctgatattgttgtatgtctcttaggatttggcttttggtgaataagtggcattagtcaagctatcaactctaagtagaggatattctactactaatagtaaattcaagcaggtcaggttaccttttggctattaacaccataatattaccatcaaaaagaggaaagttatgaagtcttgtatttataagtgtacgctaaataccactcacctggtctcttaagaaatagaacatcagacatttcaacgtttctttacattcgtctgatttttctgatacacacacacacacacacacacagagagagagagacacacacacacacacacacacttcagacacaggaccagtttatatattgtccaagatggaagacgttataattaactgtttatatcactaactttatataagaaacattcacacttacaagatgttcttatccaaggagaacagaaacaacacacaacaaagtttactgagtgtgtacacttgcactttcttttgaaacatagtaattccttttccctacttttcctggagtcactgttttataatttaggcattattttcaaccctgacacaccctcgaaacaagcaaatccaaaatgtaaaaagaaaacaaaccaaaaaaaaccaaaaccaaaaaacaaaaaacccacaacgaatattatcagcactaatattttgatagagaaaataacattttagaatgagccaggcctcacaccctaactgtgagtaggtaataactcctcagacttcactctccccttttatgtatcctgcatgcattctgagtgctcacaatgctcaaggaactgtggtggatacagaggaaaagaaacaccaagctgacctgcaggaaaggtactactctaagggattttccagtctaggaagctaaaacatgagctaagttatgtatgtattatagacttcccctcacacaaaaagcccagctaggcttttttccaggtgatgtatttcagcagtaaaaccaaaccacctcacttaagggtaaaatgtttctatcaaggccacctactattaaccattacagtatactgtgttaagactgcaggttttgaagtcacacgagttgcagatctagcttaacaatttgctaattacagtccttggacgagtttttaaacctctttcagtctcatcttattcctctgtcaaattggattagagtatctctctcataatgttaagcgagataatgcacagaaaatacttagcatggtgcttgactcaaatcatttcgtcaaatataagttttctgggtgtcaactagtatagaaatagacaaccacagggttcctggaccctgaagagaacacaacagaggaggaggaggaacgagcagagcaagaacacctcagatttcctataccctttccagctaactccaaccactaatgtgtctctgccttggctgaaaaagccctgtctgttataaaggctgtctgggatttaccctagagccactgaatcagaatccagttgtgtctgaagcatctgtattaataagttccaaaggtgagttaccatgcatacctaagtttgagagccacagtgcaagataaaatgctttacaagtgtttcaatatttgttgcgacatgattcaactaagatctgatgttttactctgagcccaatacagctgtctacagtcttcaaaatctcaggatcactgtccaaaatgtcactcagaaatcttcctaatggaattcttcctgatttacctccactccttgcccagggctcctgcccattgtgtgggaaagaagagcatgacacagaggtgccctcactgatccatcttgctctgaggtctggtcaacccatctatcctcactcacagctccacatccttctcatctcacttttccatatctctaatgggtccttaactaatttattcaagatgatgttaccacattgctttcaaacactgagtattaaaatcaagtctgagtattaaaaaacattgtctaatagacacactccaattctaatgattttggtgccctagtatatattggcttggtttccaaacagataaaatataaattgtcttaaagaaacaaaaaaatccatcaacaattcacactacgataattatttaatcttcattagaaggaaaaagggaagaaagtcttgcatttgctgaaatttgcatgtggtcaattcaaaacacaaatactgtaggagactacagaattatttaaaaatcgttatccagagaaagataaaaaatatttacagaaaaagtttcattaaaattactagataaattaccagataaaatataccagcatttatacctctccaattgtatgaaaatttctattacagggaggtgtgattaaagaactacactacttgacttagtaatagatctaagctggctactcaaacagattgccatctggtcactcaattgccatttgaaaagctgctctaaaaatatcttcatataagtgcgtaaatctcatcaaaatgtaatgacttctaattaatttatgctagctagcaggaaacaaaatttcaatgtacacttgagattcccacttataatacaattaccaaaaccctccaagattcccaaattatttccccaaaaagagacacggttaacatctcctgattccacttactatgaagccactataaactagtcctacaattagggcaatctctaccagccttttaaatgtaggggagtccatcaatttgctttagctacagaatacacaaaatacgcattttcttatttccacaaaatggcaacagtacacaaaagtaagcgggtgctgctatttaccaactctaagattatgtacacttctgtaaaatgggaacaatacagaattctctgcctcacaggttgtgagaatcagagagaaaatgtatgtaaaagcatactgtttcccagggcctagcaaaaggaccaagtctccagaaccctgatgacaaagggtaatacaccaaaatatggactcgttttccactccaccttcactggccaagcagctgccaggaataaaggtcgcatctcccaatacctggcaaacaaatgcagtattgcctcgcaaatcgactgcttcgctgaggtgctcatgagcatatttggggagaagcttcaagaacaagttgaagagagactgtctttctatgagactggagagatcctatcaaagaaaatggatgtcatgaaaacagaaatggttcaggcagagaaaacggctgctgagattattaggaagctggagaaacaggagtagaaacacttaaacaaggaaaagaaatgctagctgcacttgccgtcccatctttggaaaacagaactccagaggagtgtgcaaagacaagtgtaaaacccaaaaagaagaaaaagcaaaagccccaggaggctcctcaggagaatggaatcaaagacccatctaactctttctccaaacctaataaaaggaaatctttttccaaggagaaattggttagcagccatcgagaagagaccgctggcagcatcagtcttcccaacaggaagacgtcttcacccaaggaggaagcagttaatgatcccaaagaggcaggcaacaggagtgtcactaagaaaaaaacaggaaattccccttcaaagaggaaggagctggtcagcagtggacctgaagaggctgctggcagcaagagcagctccaagaagaagaaaaagttacataaagtaccccaggaagatgagagtgcaaacggacgtcccccgtcaggcggggcacatcctaccccaaggcgacatttcccattccgtgtcctacaccccaataaaaaattctcacacacgaagcatattgtgaatcctaaggcagtatgattatggatatgcacagaaatatacactccttcaccaaaatgatattcacaggcagaagtacagacactagaaaaatactgaaacaactccttcatttgagctgctgtttctgaagtgtcagccattaaactggagccaagattctctaagaagatactctttccaaaagacataaatcaatgggcaccagattgtatctgtgaatctctctcatgcgtgcacatgcagattatctcacaaaagctccaacaagtccaaagcagcaaacaagaagtaaacacaaaaggaaaaattcctgagaaaacagcataatgttttgagatgagtcacatccaggtttgcatggggaggattcaggaaaaggaacagtacatgctctttctgcacatgcagccacagccatcctggcttgcacaaaacagcaaggtgtttaagtgactctgatcaacacagcatgctgatgatcccattgtacatttgatttggctcaggatcgcccaatcgaatttgctaacacagtagactccagaagaatcacccattaacaacaatccaaatacagcctctaaatgtgcataaggccttttgtgatctccactggagcttatagtatctaacagctgcaactgtgactgttctagctaattgctctcagcaacaaaaataaacaatcgcttcaggaaggagactgtatccaccaaatattaatgaatttttaaaatcagaaatctcaaatcttggtttaaaaatcttgctactgctaaaaagtctgaaacagagttaaggaggccctgaaagtccttattttgtagttaattcgcccctcccacccacctaaccccctcccccacagttaaaaaaaaaaaaaaggaaaaaggaatgtggcttgggtttggaagaatttaagcaatctgagatattttaactcatgtataactttttaacatatgggggaaaagagtcgcactgattggagctatttttaaagtgcagctctaccataaaaatagacatttactcataaggatgcttgaatagagaacaagcccaatctacgtctcattgttaagaaaggggtgaaaaaaggctgtcgtgctttctggagagccgtttatggtccgcctgtgatgtcatggcaggatccaggtgcactctaacgagcagctttcagtctcatcaattcctttaaaagtgctcttctaccatcagctagttctctgagcacaagcaataaggagccagtatttacccagacccttgcaagacagaacatcaccgcaatcacagacccaggaaggaggaggaaaaattactcacacacaattgggttcatcgtcgtcctctcctcctgtccccattagggatggaagcattttcttttgctaagaaaagaaggacagaagtagttatcagtaccctatgacatctactcaccctctgtccgtagagagaaaaagtagcttcatacttctctccctatccatgaccctactgcatagctgatgcttgcgaccaaattacccaccgaacacagtagcaagtagtcatttaggcatcactaccctaaactgaggtttggagagatcatcttagcgtctggacttcatctgtctttagcctttttaaaaggctggagactcatgcctgtaatcccagcactttgggaggctgaggcgggcggatcgtgaggtcaggagtttgagaccagcctggccaacatggtgaaaccctgtctctattaaaaacataaaaacaaacaaacaaacaaacaaaactgggcgtggtggcaaatgcctgtaatcccagctattcaagaggctaaggcagaacaatctcttgaacccaggaggcggaggttgcagtgagcagagatggtgccactgcactccagccttccagcctgggcgatagggcgggactccgtctcaaaaaaaaaaaaaaaaagcctggagaaatacagttgtaataggaaaccacatagaactcctgatttttacacctccctgacataatgtcagcaacaatcaatgtaacaaaaaacagacaacagctttgacatgtcttaaaaatcagaaatacgttattttatctcaaaaaatattattcatatacgcatagaacacaattaaaaaagcaaaaaaactttattaaagaaaaaagcaaatctgaacgtttaaaaatgttgtagaaaggattaaaaataaagaggcagcgacaaaatgtactaaaaaatgttttctttccatgaaaggactgagtaaattttgacctgaatttttttgtactttatgcattttcgacagtgactatactattattgactgaaattattcttaagggaggtaaacgatattgagcacatcaaaaaatactatatgcacttacctatgttcaacttctagatgccatacatatcctgaaggatttcaaaaatctgacctcctaaaaggacacagcttattaaagttaattcagcttgtgttttagtactttgatggtaggaaggacagagctccaagagtgggggagggctgggtttcagtgccaggtctcaggttagcaaaaaatcttggagaaccttaatctctctgggtctggctcatacatctgcaaaataaggtgtgctgaacaagaccactgaagtgtcttccaactcaaaaccagactgagaaatagaacatagattaagtcttcagcctaaatcttacagcatagtgactggtacagcgtagatgcttgatgtacacttagtgaaagaaaggaaattttaaaaaagtaaactatttaaatcagagcttcccacacataagccctggtgtgctgcttggcctagaagtggttgtacgtgtgtggagataaaggttccccctcaggacaggcactcatgacataaacgagcttgggaagcacaacttttaaaatgtactactatttcagcaaaaaataaaataaattttcattattaggatgaggataagtttcagactaaatttatgaaaagttcttaccaccctttatgtaggaaagaccgaatgcttggcttatcatctggtcctcaggccatcttaagacagaaaacataagtagcagtttacttaagcaaagaggacttctttatgcaatgtatgaatagaacacaggtacttctttaagagtaacccctgaaaaacagaatacattcaacatatagttctctacatacagaaaacacactgcagcaaccattctcaagagatgaaatttctactaaagaacatttcataaagtaacaactgcaatttctgcttcagcatttctagtaatatctgcttaacctttctgatagtcacccaggttttttttttcttggtgtgaaaatctgcattatttcttataattactactacacctaaggcataacaaaacatttttaaagaaatagatgatctacaacatggatgtaaaagtacggggattttctttcaacaaggtgctcaatggtacttcctgatgggctgctttttttcttcaaggtccaaggaatgaagcactgcatcttttggatgcctacatagatttatgggtcatgacctccctcccccattctcatggccagctgctgcacctttgccacactgcaattaaaaacccgcaatccagataacaaaactaccttgccaactgtgtttcattccaaagagtgagtcaccctgagaatggctgctggtctcatcatgtctgcaagaaaatccgcagatgggcgggttgtttctgaagcatgcattcaacaggacgaggagcattctcaaaaggagtacaccatgaaaatcagcattagaggtagcatgtggctatcaacaacctgtaggtcaaagggccttacaggattaaaaaaacccagcaaggttcatcattgaaatggttattgagtttccaaacaccaaaaaaaaaaaaaaaaaaaaaaaagggcatcctatcaaactaaaacctcatcttgcatatatctgagaagtatttgaattttataatttttccctcaccttcgatgaaggtgatgcttgagtgatacaggtaagaagagtgtaaaattcatatccaagaaaggaatgaatcaggtactgtaacactagaaatagtataaatcctaaaaaatgataacttttatcatctgaacaatagagttttttaggtataatagtgggagaaaaagatcagtattctgttgctggagagattctatttttgtttgatcttttcacatacactgactgcctgacacaccccaaataaatgtctcttttaaaagagaggaatgtccctaccaagttctacggaactccccaaaccacacataacctatcatggcaagtaatttttagtgttgcagtagaaatgggcaagaaaaaaagttttgctgtttaggtattttttagacttaactagtcatgggcacaaactcctaagtctagactgaatatgacttattaattctccagaaataatagaggtagaggcttgcctatgtctttgatcccagggatgtcttcttgaattgcctccccgggtatcttttaaaatcccacctacccttactgatgcagctcaactgctgccacttctgtgtggctcagcattcccatcccaggaacaaccttctccacgactacatgcaacattaggagtctccccacttcctcctcttttaatgcactttgtgtacaacactttactgtagttacttacagatgtaatcttctagagcatgacaggctccaggagagcagaaaggcgtatgtcttccacacatttatgtctgcagaaatagactgttttcttgtatttataaggttgctataaggtatttatttgaaaaaacacctatgagtgattttgaggctgagtattaacgtagtcttcacccatatctttagttacttaaaccaaaagtaatgttaatactaagtttaagatcctaagatagtggtgagtcttaaggtagggtaaaacccatcaagcatacttataatatccagggtactttactatattagtacattcaaaatcgtcactccatagtttatgtttagagagagcaagactatccagccagatacctcacgccatccagttattcagatcgacagtgtcttatcgtttattagtagctttgcgttttttaaagagaggatctggacaacttgagcatggcagcgttcaaagatttgcaaaactaagtgataccactgtcagactgaaaattaaacaatcagccaacaattagtccaagaaaggaaaagaagcatctgtaagaggagtagaacaggttttacttttgtgagttgtaactgcatttataaaaactacagcaaagtagcttgacagctgctcctgggctctcatagcacttaggacgttgcagtcgtaacctgctggcttgttagtcctcccttccaggtggtatccaagaaggtaagagcagtattttgctcacttttatagacccagggcacagtatggtagatagttaactatgtgctgaccaaccaaaaaatctttatttttatgagccagaattctagaaaggttaatttcaataaggtccatcctatatccacaggatgcctgtaatagtggtgtaaatattcaatctttgcaacttgaagggagatgggcctacttttggaaattttcagaggaggagtgtgactactactagaagtagaaaaatatgggctattaactgcaatgacagactataaatgctcttcatccaataataataaactgtcacgattttatcagtatttgtttggtcccactgtttgaggttccactataatagaggcataaaaaagctaaatgcccctctttttttcttctacccaataaaaggtatatggcctattgctccataagtaggttaataggcctaggtactacaatttcaacaaacttattaaaaaacacattttctttgttctaggtaacgctgtaagcaagcagttgtcagtttccactacaattcatttgtaaacctcttataaaaagtagaaatcttgcaatctgtttatcttaaaaaaacagaatggttaaattgctaacatttttttctcagattataataatgtaaaatgatgttaacattaagaatttcacgtaggccgctctaaaactgaatttcaatattgttcagataatttccaagcacaggttaaaaaaaaaaaaaaaaaaaagggagaaagacgaaatttctcctcaaatataccagtagttactataccaacttcctttgctgagaatttttccactatctgctcaattataaaagaactgctgacatgcaaaccaatcaaaataccgataaaacatgcaagaggagagaggtgaggggaggatgttccaacatcacaaaattagagtattaaattcatataataagaagagggagtatggagatttaagactaattgcatgttgaaaaaaggaagtgtcttgtcactcaactacgctcttgactagtaggttgtgaattcaagacaattacttttagaatggcttttaccaaaaaagccgacagatacaataaaattaaaataagtcatttagtatactttgtttaaaaaaaaagtgtttcattattatactcatttgtctgaagttctatagaagtagaatcctttcacaaaagatcagcaggaaatccttttaaccttcacagatctgttaagggtgtatacaagaactgaacttctatgcgaaatacggggttggcagagttcatggtttgtaacgtgtgtgacacacaacaacactaacttaacagaaactgaatttctgattttagggaacaatctcttgacaatctagcatttgtgcaaaaaagtaactttcacacagcaacacttaatcccatgagggaattaaagattgccagtggaagccgagtaagctactttcctcctgtttggtttttaactgacgtgtaagggtgattatctgtgcaaaaagctgaaggttgaatcccagccataaaatggtgtcgatatccgatttcccaaactttacaactagcagatgagagtatgttctcctgtgagaattactcatttagcagtatttgaaaactaatcagaaggtgtcattcagtccaaaaattttctgcacgttctacttcaattaacttgccttttggaattctaagaggtaacactgctttccactaaaactctcagggaacttcttttaattcaagaaagcaagtctgcttattagactgagcacaggtgcccccgaattgtgtataaagacctactcaccacactgttctttcccttcaactttgtttattgatgtactgaacatgaaaaagtacaaagaatccaaacacaaaagaaaacatgtacagcctcttaaatactcaacagaatatattttctattccaacagatgtgaattaagtcatactgtacaacttcaaataaataccagccttacattttattaagtgctctgataaaacactgtaaagtgaagcacaatttgcatgccctctcatcaatgccttggtttgctacagtagtataggaaagaagcatgtagctgctgttttcccttgagggaaaccttattatttttttttaagtatatacatgtattttattttttagtgtttttctttttttaaacgcagaaggttaactctggcaatctaaatgcacctaaggatatgagaaagtgctaagccaattgatttctgaatagcattgagtgggtcagcatgaaaactcgcttattcactttagcacgcgcctcacagtatatgtactgtactatactgaaaaattttataactacaattttaaataataaaaaataaaactcaaagcaaccgcaaagataatgtacaactatgttatgcatagcacattgcctgttctaaggggaagcatgtgagcatctcagtttatacaaaaagcaggacgtaactatatagttctcagtgcatcctgatgaaggcatttttgccttcagcttttttgaaaatttattataagctagatgctaatcagaaaatattttgtattttttaaaatttctttcatacatggtaaagacttattttattatttccccaaatagtggtttttaagcatcatacaaagttaaatttcaatagcatacagatatttatgatttttgtatgaaaaatgtaaggaaatttgttcaaaacctatggttatactcatttttttataccacaaacatatttataaaccaaaatgtagcatcaccataaacagctgaagctagactatctacagacaaaatttgcaacaaatctgatgcactgtaaattcaagtcctcaggacaacaaaagtgattaagcaagacctcaagtaacaatgttaatgccatttacaaaggaaaaaactgatacaaaaacattcaaaacctgaacatcacttggcatgtaagggaaaaaaaattaaattagctgaaaggttcataaacacaaggtcttatttacattacacaaagctcaggtgttagccttgaacgtaactttcaaaataccttcaaatatatccaactcagatcacttttgctgatttgctgcagtacaaatcatgtgcaacgtcttttttccttaagacaaaacaattcttcaaacaatactgcaagtacatcactaaacaccatgagctctatctgaagggatttctttaggaagaacagattttttcccccatctctcggtaatttaaatttcttgcctgctcttatatattcttttgtaaattttttttatttgtttcaaaatcacaaatcaatgtgagccacctatcacataataaccaggatgatcagacgctccactggtgattacaaaaatgaaaccagcagtgtttccccccattgattctactcctttcatacaaagatctcaaaagtattttctacaccataaatctttctaaattttccaaccgctgcaaatttcctggtaaattttaaaagctcactaggtgtcatatgaagagatttctcaaagtattcaagtcaaaatatttgttccaggaccagtaaaaagtttctccaaattttcttttttataaaaatagatgctttttttaaacccacatcaaagaggctcttatctctttggcaaggtactgctttacgaaaagttctccagtattcttacaataagcgtttataatgtagcccccccttccccaacccaaatcataattacaaaataaatactgttttaaacttcataaataaaaatgtaaacttcaaaatacttttcttaaacagacataacagcaatgctttaaatgtaaaccaaacacaaagctaatcagaaaaaggaaaaaaaggggggaaaaaaaagacacaaccaactgaagaattacaacacaaagcctcaatatttactcacaggttcaaggcagttatgtaaaaagaaaagaaatgtcttcccttagctgaaacactttaaaaggtccaccttcttcaaagaaggcaatagaatgcaatgtgacaggtaaaaaccctgtacctcttgtccatattcaaacataaaagatatttaagaagttttaattcaaatactagcaataaaaaatctcacatatttcttaggatgctaagtagtcattttatccccatctcaacactgacttacaaagacatttactaatgtataaagtttctcttaacttgcctttgttgtatagttttcatatataaatggactgaggacaagagctcattaggctttgtgcgttttgtttgtcttaaaggagacctgcagtactctgtctcccagacggtatccattgaggctagctatcgccatggcagcctcatcatagtttgtcatagtcacaaatccaaaacctttgcatttattggtgttaaagtcacggatgaccttcacattggtgacagctccaaaaggcccaaacatttgccacaggatactctcatctgcgtcaggagccaggttgtacacaaatatacaccaccctgttccagggtgcccagggatattaattccagccaaactggtcattccgtcaatggtcattggagaaaacctgctaaacagaataggaaatacacacatacacacaaaaaataaaaacagaggttggttatagcaatgaacgtataccttttccatccccaagaattttagtaactctcctcccccaacaaatatataaactatttcatgttttgaccaaggtctgtgtgtggctttgcagtgacatgctagactactgagatattaataagttatgaaatgaccattattcactgtactgaatatcatccacaatagcaaagaaatatatttagaactggcttcatgaattaagcaggattggcaggggaagggatcaacacatacgtaaacatgctgtaacgtcgtaacgcaatacgaaacaaatgatgggtttttaaaagaccaggtggcatccggtggtataaaaatttcttgagtcaattgtgcttcaaagagcagcttttcattaggttgcacatgcaaaataaaacccaacaaaaacttatgaggggtgtgaatagcactcccaaaatcaaagaaaccaatcaactgtggaaagggattatgagtatcatgaacctctatcattacctctttactccataagccatattgagcagattgtccaacctgcaaaacacacatttagcaaacttcagtttttaatttttccccttgatgttcaagaaagttgggctcattactgccatcttccgaggggatatctgtacactgattatatgtgaagactcagaatgctgggtctttttacgtttttaagctaatgggcaccgactgccacaggacagttcttccaatgaatggtttctctctacaagggtcagtacatgggacacagtgacggtcatctgaggatacctttcagagaggaagtgcgaaagctctgggatagttaactttagggttctcatcaggtagcttcaaagtgatcaatgtatagctacatgttctttatactacttttgattttcacaactctgttggtgcctgcagatacctaaggcacacagggtttaagtggcttgctcaagaccacagggctagtaaattatggcattgatactcaaactctgcaggttacagaattctatacattttcctttcatttcccaactttgaagggctttcatcttttagaatcaaggaggtataattacaggtagaaaaaaccttatggacaacccaagctaaccctcccatttctcaaatgtgctcagctgaggtctagagaaggaaaaaagaaaaatccatcactccagtgtgcaacaaagccaagagttcagatcctgatctggatgctgtattcaaattacgctacaggaagtgtcgtcctactcagttttcaaaggccaggtaggaaacaaaacaagccaatctgagcctcacttaaaatgtttatagaaagtaaataggggtgggggtggaggtgtaagtactctttaaaaccttctacatttttcctatatcaaatattagttttacagcatttgactcttctttatcagtttcaaaacaccactctaatgtcccaaatttccacagtgcttaccaactaattatgtgttctgaggaggaggcataacttaatacatagtccacaaccaccctcaactgctacaatgctcaacactctccaaagacatcccagggttgtccctctgggactgggggtgggggtgagaattttttctttaacacccgtgaaaggtaagtttgaaaagtctcagccttatcacctaacctgtggcatcaagtcacgctaaagtatacatgcaaaagccaacaccttttagttttgtaaaagccaaaacacatctcatctggtctttcagaatggggaaatatatagcctcccacatccctgccctcagtctccactgaaaattctgttttgtaaagatgagaagaactgagcttatgcaaagtgtaaggaaacagaacagatcacaatgacaaaagatcttcgtgtgtgagtgtgtctctgtgtgcgtggtgcgtgtgtgtgtgtgcgtgccttgacccaccaccctctcattgcaccactgagcacaagccagggtcactgatagtttataataaatatgtgatgaccaaataaagacaatgaggttaccaaaattatggtcaacttagtccagaatgaaaactagtaagaggattggttggatgaccttgtctgcacataagtaaaaagatgtggggttttattttttgcagaggtgagtacagtcaaagatgccatgcctttatagtcaagaataaggatcacaactaccagcaataaagacaaacacatattagcaccaccaatcataaagtaacaatacaattttatcaaattgctggaatgatcaacacagaatgcatttggcatatgctacctgtagaagagaaccgcatactgaggtctccaaccaaagtgctagaagacccagaatgcagaggcaccttatcaattcactcaaaagttacatcatctatgcccattaattgcatccatgtagggacaggtcatgctttgctaccacccactcaggacaccaagcatacggcccagagacagatgagttttcagaattttcaaacagggtagaaaccaaatctgcccctgaagtgaattaccgtcaggccttttttaacaatggggatatgttctgaaaatgtgtcactaggtgatctcgttgttgtacgatcatagaatgcacttatacaaacctagatggtaatagcctaccacacacctagttatatggtatgggctatggctcccagtctacaaacctgtataacatgtcactgtactgaatactgtaggtaattctaacacaatgctaagtattgtgtatttaaccatatctaaacatagaaaaggtaatgcattgcacaatattaggatgactatgatatcactagacaataggaattttttgcagtctactatattatggtaccacggtcgtacatgtgattaactgaaacgttatgtgatgcatgactgtacatgcagtgagggagaaacatttcgttttccatcctccatctccctcacttccatctctggcatccccagacaggaggtttcgaattttttataacaggatctccgaggaccctccaaattatgatagggcatcttttttaccctatctgtgaagttttacatgataccatgatcttcactgattccttcacttctctctcattttagaaaaaaattggtcctttggaactaagccaagttatccactctaatctttcttctcctccatcaccaacgagtgtagggagaagcatggaacctagaaaacagtgcccaggcactgctgaagccccctgactgtatgcatctgagcccagaagtatttcctagctttctcggtgccatagattcatgtttcccatgggagctcagaaaaggcaacgggtgctctacatgggcaccattcactccaaatccagtagcagttggcaaactgtaacacaggcagttgtaagagaaaatagtgcagcagctcaaacacaaggactactacaacaagcccctagaaatatgtctgctgggtctgtccactgctcaaggacatctttttattttatttatttatttttgagacgaagtctcgctctgtcacccaggctggagtgcagtggcgtgatctcggctcactgcaaactctgcctcccgggttcacaccattctctggccccagcctctcgagtagctgggactacaggcacccaaccaccacgtccggctaattttttttgtatttttagtagagacggggtttcaccatttagccatgatggtctcgatctcctgacctcgtgatccacccgccttggcctcccaaagtgctgggattacaggagtgagccaccacgcccagccatcttttatttatggtcatttataaatggaagtcaatttttaaatggagagcaagctagctgcctccagaatatctcagggaggggtgtggatgataacgtagtacatatggaaggtaaatattaaagtatccattaaatatatatttaaaataaaatataaaataaatatgtatttaaaataaagtattttttacttatatttaatagatgcactgaacccagtaccttctcagtcctgtgtatcacctgcctccctgggggaagactgagcaatcatcgaaggggagaggcggcgagtggcactctctcctgctctttagcctgaacaaaatccattttacaaataacacagcaagcagatatggaggattagactggataacctgctttaattaaaatgacctccatttaaagaaaaagtaacttaaaaaaagattactacaaatgtaaatcagagtaaagaatggtaccagtaagggaaatacaagtaaataaggaaagggagagccgattatttctcctactcttagtacaagctacattataaggttagacacaagataatccaacatgcatcacatgaagtcagatgagatatctgaaattattttatggtcttgctttaaaagacatttattaagatattaggtacatggaaaatgaagccaaccagtatagtaattagcaagacatttaatacagattgtctcatctttatccttttttatgtttgattagagtttataatttaatgaatagcacacgcccatgtacatatgtaatttatgaaaaaggcacataggagagagatgtgtataaacatttttctatcaacaggaccaaagctccaattataacctgtcaaaattttgaacagaaccatgtatcagatcattcctattttaaagctaggtgttcataagtagaaaataaaaataaagtacctgcctaatttctaaaaaaattagctgatggactatgggaaggcctacatgtaagtaaggggaaatgtgaacccgattaaagtcagaaataaaaataggaagataagttattgatgggtaagaaaatatactcggaatcccacaaataatgattatcaaaatctctccaaagcgccaaccgagaactgcttggaaattatctacaacaagatcatcttcttactgccttactgccttattcaattagatggtatcatctgtcctctaagaaagaggaaaagtattcaaggggattgataccggtttcttccaaaaggaaattgtgataatgcaaccagtacgtcatgccttaaaggcaactcaagtgctcatttaaaaggctttttaaaaaatgcataaaggctcatagaagcaggcacacaggtcattacactagatcatattcaataaaattatagctgtttcacagaaaagaacatgaaaaaatttggcttaaagtttaattctgatatcatgtcccaagaatatacttaaggggcttgaattacaccatccatccaaataaataaggcttgtcctattttgaaaactgcagtcaattaaataagcgtattagaccagcagtgctcatattacaacaattctctgattattcatagattgactaagccataaacctcacaaacccacctttaaacttaacccttattacatggatttttaagctttttgaccataaaagatatggctcatactttatgattattaaaagtattcttgaccataatacatataacttatattgctcaatctctctcaactcccaaggtactatgagaacataaaaatacagtgagaaattttctacatgtctgctgaaaggtgacaaaaactcaaggcaagagcattaaaacacaaatatcagggacaaaatatatctgtgtgatgatttagactcgaactacagaaaacagcaaaataccaacaaaacaagcaagcccttaattcaagtttctttatcaggtgaaagaagaagggggagtggggcggaaatcaagataatgacaaccaggttcaatatactgtattaaagaaaagcatcaaacatcaggttaaacctgaaatctgatttcttccaacacacccaatctagatcaaacactatctctgagcacactaactcgttcatattttattatctggacagggatcatgggaggaatgagaaatggggtgaatgggacaacagttaaaaatctgaagagagaataacaatttctcccattttctgaaaccaagtttcccttacaactgacaatctcttattctcttcttccaaaatgtctttctataggagtgaaggaaaaagaattttcaagttaatgataacatatggtactaaaagataaaaacacagaatgggccagaaaaagataattaaatttgaccataagaacatcctgtaaagctttactcaaccaaaaataaaaagcacagagcctgcagggatggaggctaggtaaacctaagggctgacacccatcaacaacctagcacctgagtcacctacaagccttgccatttcaataatcaggcactctcccaaatcctgtcttctcaatcttcctaagaattcaatcttgattccaagaactttgttttacttaataactatcaaacaaaatcattgcttcaatctggaaaaaaaaagtagctaatatagctttccactaacagcaaacattttataacttcacaatgttaaaaatcaaccaatacattatgaagaactttgttctatctaaactcgagatcattttcaaggccccaaagagctctgaaattaactggacaagctgcctaggaaatacctgtaaaattccttcaggcttgttcatcctacgtttgcaatttaaaaaagtatatttatacatatattattcacttaagatgtcacagaggaaacctatgtgcagagctgaaaaagggctttctttgtgagacttctttctccacaaaggcaagcatcaggcagccccacgcatctcccacactagtctgatcaccactaccatgggaagtcaaaggtggcaaaggtttttttttttttttttttttttttttttttttttttttttaataccaatgccttttcctcacagcagagcatgaagtacaaggctcaatgcttttgacagtaccacctcttctcccacggcaaaggccaacttaagttgaaatttaatgtggcattcataacaaatttccttctcatatctcaagcaacataatttagtatttttttaaaaggagctatttttaactgattttatctccactctcttcagcactgcaaatattccaatgaaaaaaataaatgcatagatttaagctagaaaacataactcctgatcttattaggttatatttgtgattatatttttggtaattaactattctgtcccatgaatgaaataaataaaattgatatgcacttggaaataatttttaaaaatcagtgtggggttagatagcattctgggtatagtgtaccatatggccaaaaaggatatttaaaaatgtcctggaaaataaaaactgcatgacttgcttatgaaaccaaaaactctctgctctgcttaacttcttaaagtcactgttcttctcacatgcagattagagattttttgaatgactcctggtttgttatcccaggatcagaataaaacttaaacagttagcatatgtacacctgtcagtgagatagagtgtcttctttgggctaaagccacggtcattctatgaactacagagaggtcagtaaattacaaccgacaggccaaatggagactgcctcccacctgttgctgtatgggctataagctaagaatggcttttacatttttaacaggttgtttaaaaacaaaaacaagacagatgcaacagtgaccataacccataaagttaaatatttactatctggtactgtacagagaaagtctgccaacctgtttgtaaacaattttgaaaaggaagagaggaactcatttgtagaaacttcacgtagtcacataggttatatacccttaatggtgcacatactataaagtgaagtaacagaaacagcttgacctaaaaattgacacatgagaataaaatcctttaagaaaaaaaaaaaaggaaatctgaagccctggaaacaattcagataaccccagaaagctacagattagaatttctcaaccacagcattattggtgctttggaccaggtaacttctggttgctggggctatgctgtacactgtaggagcttagcagcatccccgacctctagcattacatgctagtagcacccccacaggttgtgccaacatgaatacctctagacattgccaaatgttccctgggaggcaaaaatcacccttggttaagaatcactgctgtaggttactgtcctttggtccccaccttcaatattagcaaaagacactattcctcaagtagattctctctgtgcccatggagatgaaaaattaatagtaataaaaccaacaacactgacaaaagcaaaccagagatcctgtcaataaaagtactggacagtaaacctgagtattctctttcagtttagtagctgggcacaagaaccaaaccagacttacctaaaacgctgtgcctgctgagctagcggtcctggataccttctgtttggagactggtacagctgggaaaggatggcctgattggttttttggcttgggttattagcaaactttacagtgattggctccgtggcaccgggaggtttctggccatttaggcctttgatagcttcttctgcctcaattcgcttgtcaaatcgaataaaccctacaccccttgatatgcctatggtagatttgagtaaagatttggaaaagagggaacagaaggagaagggaaggagagaagaaaggacacattaatttttccttctcaagaacatgttttcacctacatataacatttcccacaaaatcacaccaggaggaaactttcccctttacttactagccattcagtttagaatcacaattttgcatttttagaaaaattcgtgtcacttacataatctgagtacccattatcacatgcattccaatcagctaagacaagaaaacacaagcatgtccatgttttctctctctcccacctccctcccgtacactcttttaatgtcaatagtgtaccggagttccatttttcaatttgtgctattggataagcagctcagaaatgagggacacagtagttcctgtccttgaaacaaggagaacagaaagaagaatttgctaaaaatgctacaaagctatgctaaaaatacatacactgtggtagaaagacatttcggttgaaattttaaataatatattcagcttaataatattgcataggatataggtcctttaggaaaaaaatgcctgaaaatgctcttccagttctctgaagctctcttgtgcttctgactagctatattttattacagaaaaatattatatggagaaaaagaaaagacgtagattttaaaaataaataaatttctagaagtaaagcatcaaagctttctgacctcagcagcatcactcctgactacagaagatcactccctgccccacattctccccagtgtgaaagacacaaatgggaaaggatagccaagaacctttccaggttatgaaaaattgtagagggaaacccagcttattccatttaattagcgtgaacaggctagtggggtgaccacagctggtcatcatgagataagcagtggcagggaaattttttttggcaagtaaatgagcactggaccatcatacttggaggagcttaaaaaaaaaaaagaaagaaggtctacttgctttaaaattaatactgtgtaaggtcaatgactaagaattttctaatgtagacaaagcattttttccacatatgcgtatctaagacagcccctatcactttaccttttctatttaaagagcatgcattgcacattattaccacctgatggctgaataagaaaattgcagggtttcatttttcatttcaggtaaattgagtaagttcactttgaaagccttaagtatgaagaataaatagtgaaatgatagcaaatcctttcacttatctactagcgcctattaagaattaataacctctagaatttagctgttccattagaaaagcatcagattagcaaaaaaaaaaaaaaaaaaaaaaaaaaaaaacagcctctacacagctagagtcacctaaatcggtggtcctcctacttaagcatacctaagaacaacctgtggctcaccctcagagatttattcagtaggttctgaatgaagcccaataatttgcatttttagcagggttccagaagactgctgatactgcaggtgcgggacatacttgagaaccgctgactaaaacaagctaggtccacctgtgatggactagcaggtaaaagatgagacgcactttgtgtcataggtgaaacctactctcaattcacaagatctcagaatgaatgaattagaaagcacaaatgaaataaaaaatatttttgttgctttgaacaaattcatctttatttctaggcctggatttctatttaacaccattattagtctatgtgataacaacacagggtggcaatgtataagtattatgaattaactaacacaattaaggaggctgtattttatatactctcacttgactaaatagtctcatgacagcaaaatctgtaggctattctcccaggcatgcatgtagtgctagctctctctactcagaactctaaaggtggtgcttcctatgaagccaattaacaacacagaggcaggtaatatgggctcctctgattagattcagatcaactaaatggatcttcacttgatgaatgaaaaatctggctcaattttcttctgaagtcactgctttaaaagaattagacattgtaatatacaacatgcctccaaggtattattattatacgggtggcggggagagaaacaaacagtgaggagaaaagctaccttaaaaaaacaaacaaaaacaacctcacaaatcttcatgtggctgcttcagtctatggtactacagctaatatttcctcctcacaatgtttctctattttttaactgtttcctaaagaacaagtattgctttcattttattttttacttattttttgaaatggagttttgctcttgttgcccattgcccaggctggagtgcaatggcatgatctcagctcaccgtgacctccgcctctggggttcaagtgattctcctgcctcagcctcctgagtacctgggattacaggcatgcgccatcacacccagctaattttgtatttttagtagagatggggcttctctatgttggtcacgctggtcttgaactcccagcctcaggtgatccgccctccttggcctcccaaagtgcttggattataggcatgagccactgtgcctggccaagtattgcttttataatagaaaattgtatctgtattttatttttaaaattcataatcaaatctatattgctatagctttgttaactaagatttggcagaacaactcccttacattcaagagttttaatgaacattttagtcttcccatttcagttgggctaacagtgatattaggaataaaataaatttttaacattcaaaatttcaaactcttacatatgcccatacagcacagcatgaacctggaaaacagcctgaacagcaattaccagtgtggatgtagtgtaatcctcccttggagaactagctgcataccgctgcattaaacttcgctttttgacaaaagaaaggttgtttattagtactctataagcaggatgggggcttttatcacacagtggcttggaaatgaagattatagcatctataaatttattacaagccatgaaacaggcttcaatcctgcaccttcagggtggaaatgactcaagcacgctcactatactccacaatctatttttatccatgcatatttatgaacaattccagcagaaaattgcattttctggcccacatatacctttgatatgttctagaagcaagactgctacatggaaagacagaatatttcacaatctgctagtcagagacagggaaagactgtccggagtggctgtctacttaccagtgacctggtcgacaagaatacgagaagtaataatgcgtccatattgtgaaaaaagctgttccaactccttctgggtcattgtttttggaagtccgctgacatataaatttgcatctctgatagaagctgaacttgggcgagcataggaaacctggaaaaggaaaataaaattaaatgtatatgcatgctcactcacccacctccctttagaaactcaaaaactgcctcggtaactttcccatgaacagcatagaacactgaagttcaagcaagtcaggtgctaactgctttattcatttccaggaaaattctagacaaatgggtagtagtattcccattccctctcccctaggtggacagggaagagtatctgtaatatgctggactagcctactgcaagggacagaaatttcacaatatatcccatcctccagattattactaaaaatggtcaatgggtctgggatcaatttgcggaggtatagtgattcaacaactgcctgctcattttatcatttgtacccacctttagtccagttttaattcactaaaatttaaagttcttaaaacagaccagtggtgcatacagcacagtactgttcacaataataggctgtcttctgtggggccaatcccctagagcagtggtccccaacctttttggtaccagggactggttttgtggaagacaatttttccatggaccatggtgggggatgcattagattctcataaaaactgcacaatctagattccttgcatgtgcagttcaaaatagggtttgtgccctgatgagaatctaatgctgcagctaatcggacaggaggtggagcttgggcaataatgctggctcacctgctgctcacctctggctgtgtgcactggttcctaacaggccacggactggtatgggtccatggccaggggttgggaacacctgctctagaatagggatttaggcccaatcattctaagcttaaagattccaaattcatggaacatttttgttttctagcctctcacatctgtgtgggtggtagtgctacatttctaaaaaaaaattcacccttatcagtaagtatgctcttttgatatatgctgtatgattgtccataaattcccagaaatttgaatgtgtgaacaagccctcattatcctttgtctgttgtcttctcatccacaggtctttttaaccttgattttcaaaaggtcttaagtccctataattaactttgcctgccactgtatgtactttcaaaaagtttcatgtctttgagatacggtataccaaatcccacaaggacgaaagacaaaataggtctgcatgtatttgtttataatcatcattcctcatgtaaactctgtgagggaagaaaccacatcattcttggtcatcactgtatcctcaatgcctagtgagtgcctgacatgtgatagatgctaacacatttggtgagtaaagcccatccaataataccccattgatcatgcagatccacaacggcttactgaaccagagcatttaagggtcagttcaagtcatccagatctcctgccccaattgtaattgatgactctctgcctataacctatctttgccaacatttagtctcatgagctattcctgatcgcattccctttggtttagctgtaatattctggactagcctacttcaagggacagaaatttcacaatatacgccatcctcagattattactaaaaatggtcaatgtgtctgggattgatttgctgaggtaaagtgataactactgcctgctcattttattattggtacccacctttaatccagttaacaacaaactttcccaatttacactaatacttaaataacttttagtatgaagcaccaaacattttccccataatttgaattgtgcccacagctctctgttgccactttttcttggctttccagaaaaaaatataagccacattttatactactttataaagacctcgttatctttcacacccctgccccaatggtgttaacatttaatactcttctttattcaaaccgtttgctcattaacaagtgaaaatatacctgttgttccaaaggctatgtttggaagttatattagcactgtcctgttctacagaagaaacaaggaatttggaatagtggtggagaaaacatacataactattcatacgctatttgttttctctatgcctaaatacttaagaacaatgaagactggggaacttaaatgtaagtgaagaacaagtggccaatttcaagtgattaatgtaacttagatggaatcaaatcttgggattgctataaactgatgaaacaaggccaatgaattatatatgcattcagtaatatgaatcaatgaaaacttaatttcttttctcgtgtaagattctcaattatccagaaaaggtgaaacctcaccagctgggacgtgcatccctatctaggattctatggcttttttttccacaggagggagcacccaacaagtcagctgttactctgttccagatcatgtgactgaagtactcccattatgaacagccatgtcccatgggctccagggcaggcatctacacattctccaaggaggctaacttccaatgactgatcaagcaaccagcagcaggtgacaggctctgcatgagatcaagtgtcacaggaggcagtggaaatgtggttaaaggtaacagctaatcggtgtgcctgggctcaaaactaggtttaattcataaccagttctgtgaacttagaactaagttcttcaagcctattaccacaattctaccttctttatatggctattaggaataattaaataatttctaatccacatgaaaagcttcagagcctaatctatgtgacattataaatattatttacctctacatgcatctgaaaatttaggtaaatgcccagccccttaaagtagagagaaacctgggtccattacagtgttctagaacaatttactcatgcagtgacattcactgctttgtgcaattcagatgagtgtaggtggtgtgtcttaaaagtcatcctaaaatatatttaggaaaatgggtttatatttaatgcttatataaaggctttgaaaacatacctaggtcagttatgtgattttttttttccccaatgtccactcttcagtttatattgtatctttagttcccagccacattaaaaaggctccaagacaaaccttctcaaaaacagtatctttcagtgacattgtcaaagaaccattttccactaccacaggcaggacaggagtgattagattatatataaacttacgtcggtaacaatgtttaatgttaaacttacatttagggcattatgagacttcaccatttacaaggcattttcacaaactacaatattttgtctgtgcctcacaacaaccccatgaggtaggcagcatacatattagtattttatagctggggaaacaggcacagacaaggtaaataacatgcctaaggttatacacaactagtgttgaattctgggttcaaactctgatctttctctttctgtgtcctggtctcctcatccagttttccttcaataatactatggtaagtgagtgtttcagttcacttgttctgagttgggaaaaattaaatgaatcctggctgtttcttaaaggcatacacagagaaactggccacagacagaaaacaggatgttgctagaaattagttaaaagttattccactttttattattttgagacggagtctcactctgttgctcaggctggagtgcagtgggtgatctcggctcactgtaacctctgcctcccgggttcaagctattctcctgcctcagccttccaagtagctgggattacaggcatgtaccaccacactggctttttttgtattttttagagacagggtttcaccatgttggtcagcctggtctcgaatgcctgacctcaggtgatcagcccacctcggcctcccaaagtgctgggattacaggcatgagccaccacgcccggctccattaatatttttaagagtaattttttctaagaaaagagaagtggccactaattacaattaaccaaagaaactacacatcatcattagaatttttaaattaatttttgttactttctaattctcaggagtaagcaatgccattttcgttcactttcaggaaataaaggtgtaagaaagggtaattgccttctccttcctcccagaccaaggctcaaggtcctacccctatccctttatttactgttcttggaattaaaacagcttcctttcccttccactatcaaggatatcgctgtcatcaaaatcctcccttcctggaaaacatttcttctttcatctaaaaagattataaatagaaaatgtatttagacctaagtgggaagaaggctgatagtgggataaggactcacactctggagatcagttacctaaggactcacactctggagatcaaatcagttaccaaactaaattttgtatctgaccattaccagcaaccttctccattccgattttttttttttcctgtggatttagatcttacaggtgccttcatatgcacctacagaatcatacaggggctattttcagaaagtgttaagtatctttttggttctacaagactaaactcccttgaaggcccaaaagagttcgctttaaatgacaaattctatttagaaatgcttcaaaacaatggacttccagcatatgtcctactgaggtcaaaatagcctctttctccactgcaatctgttctccattttccatttgctggattaatatatgagtttggattttaaattttcactgccacttaaacaggtgaatatttaatgcatgagaagcaaggttatgaaatgtcaaaactactaagtgaaggatctaatttaagaggcagccagagagtctgcaatttaaatatttaaagatgatacagggagtacaacactgaacaccaatctactccaaagatagcaatttaaaactcaggtttattctggaatttctcacaaaagctacgagtgatataataaacaaagacaagcaatactgagattatatgagggaaggggagggacggggaggcagtaagtacttgctactacaggtaagtaaatggcccatggcttctcaaactgttcttcacaaacaagactagactagacaaaataaagatagaatatatttattgaattatgtcttgaaaatggaaccgtttgaaatatagtgtattacttgtaattaaaagctcatttcttcatcagcagctaaaactaatgatacattaaacatacaaagatgagtaacacatacactaagagtgggctatcaaacacaagttgatcaaaattatacaaagaaacaaaaccatcttatgaattagtactttattaaatgtacatagcaatgtttaaaatcccagtgcatcactatcagaagtccctctaaatgctttcgtccaaacacacaactgctctcgtttctctgattcatcaatggaaagatcagtgacagtggacattaataccaatagattaaagtgataaggtctataaatgaacaaagaagttccctcttttttaaactaaaaacatttgagaagtcacccactgctaagatcaccactgaacaacttttatcacttgtcaattactgacccaggactacaaacattaaacctgaaaattagacacttgccactttagacttttttcaaaaagctcctttcaatctctccagctgaaaggtcacagttatgcctatttaaacggacagttaattgctgttcatattttttaaagatggagtcttcgtgggactatctgaaaaatgacactataactcaataaaagttagctctaggctctaagtaagcagtagcaaaggtcttgtgacagcatcatggatatttggacaggtggctacatcggaccttccaaaatgagctcagaagtatagtacacagaagaagggggatctctaaccacaactcaggccagagacctcaaaattcacccaaaaggaagatgtgtactttgatctgcttctaaattcaaactcctaccaggaacaagtctcaaacacacatcaaggcatacatgtatcacagtccaatattaagttttcaataaggaagggcatatttcacaatgggttgaaaatgaataagcctaagataacaataagaaattaagtattagctccagcaaagttagagctaaaagaaataatcacatccaaacaggaaattttataaaaggtattaaaggttagggcagttatctttaacggatattccaaaatataggatttagaaaactatcagtggaaaatacacacagaaccttaaattttatcgtgactggatttgttgaatgttttaagactaaacaattgctttaattcaagtgagaagttcagagataccacggaatatatttgataatgtcatcctcaacttaaattacctaaagggctccctaagactttcagataaattttagaattcttattcctttatggtcagagcactggctacctcttccatacaagtatacaaaaccttcggtagtattccaagcttcctgctctcacttctctgtgttaaaaataagctgccctccttccaatcagctaaatttcagtcatttcagacacctcatgggtatcacctagtccctaaagtcaacactaatcagtcctctccactacagtctgagttgggtgcctcttacctgcacccacactgcattatatgccttgttttcttaaatactgacttaaccaaaatgtacttatctcttaaccctttcttgtgactgacttaaccccttgaaataagaaaccttgtcatcatcctactttgtacatcctggtaactaccacacactcactgtaatgaagatgatttataatcacatattaaattgagagtttatttctgaaatactgtttaaaagctaacagaagccacaatctttgtcatatacccaacattatacgcattggtactttgtgtacagactacaatgaaaattctattaatcatttcaaaaatgaaatttcatttctcaaattggggattcaagtccccagaggcgacacaatcttcaacaaagtaatatggtgctgataggaggctgtggggcggggggagtcttaattttggagcaaaaagaaaatacagtgatcatttagtccaatttctttgtatctgggaaataggaagactgaggcacagaaaggtgaagcaacttttccaaagacacaaagaaaaagagttgggtgtaggactcgcggtcttagctcttcatcacgggattttccattacatcattagctgcaacacagtcttcaaaatcataaaatcttcctgtgaaatgacagtgactgggacaataatcagacatttccaaggagacatcagaagagctattcctagaaaataagaaccttagctttgctacatagaatattttcttgtatacacataaggaaataataaaacacatcaaaaaaactgtcttaggacagttattataattcttctactagtaatgcctgagaattatttaggagatgttggagaaaaaaatctaattatttgggagttgaagagaaaaatcaaactaagaatcctgagactagtactttccaccaattaaaacgtaccaacctacaatagctagaatctttttgatagtgtctctcccttttataagattacaaaccaattaacaggaaaacagaatggcaactggctgtttacactaggggagattctcattttcatagaattttcaagttttagtgcaacatcattaaatattagtcaaggcagttgatcttagcttcaacttaaaggcgacctaggaataaataagtaatgtcataaaaataagtgatcctatgacattgttaaagacaataataaatctactgaatagccacagaaaaataaaaagtgttttggctgtaagaactgtatatcaagcaactgatcatcaactacagacttcacaaattagaccacctttttcacacatcttaaacagcctctgacaaactacactgcactgagtgtggtttattaaatgctacccaaacagttgcatccatgtgtatcaaagagggtctaaataggctgccctgacaggcatctcgtttttagtaaagtacaactggtacataacttctgcccttttattgttgtttctccttggttctagtatgaagttggttcaacaaggacatctcatactggtaaaggcaaatgggatacatggtaaagatattcttgaaatgcaacttaggccataaataccttaccatttcttaaattttttacctgcagagatacttaacagaaaataaaacaattgagcaatggtagtggatatggcatctgaggtggaggcagtgaaatcaaattcactatggtagtggcagtaggctagccattccaagtctaagcaggaacttgtcaatcaaaatgttccatgttccatttccaatcctgtatatttcacttagccttttcagactttagaaggtgattacactaaagtagtataaaaaatagatgggagttttagcgtaaccaccaaagagtctattcctaccggtagctctctgcattagaaaattgtcagtagtggttaagaatgctaactcccttacttttaacttcagaaatgagcctgcatttatttagccacataatatttataaatactaagtaatgtgaataggctgcaactgaggcaagcacgtgttagcttagcaccaggttcaaaaatatattatacaaagcagaagagaatacactgtaactggtaaagttctggccactacacagcatactatgaaactagaggttaggatggaatgtttggaccagaaccctcccatgttaaggagtaaaaacatatggtatggagtcacacagagctaggtccaggtcttggctctgttacttaccagttaatcatttccttaggtcttctatctctttatttgtaatttgatgttaatcacagtacttacctcatggaaaccttacaagtattaaatgcaacaataaaactattagcaaagagcagaggaaccataaatgttttaatcataacatcattttatatacatacataggaaacaattcagataatgatagctcctaacacttattgtttaccatgtgccagacactgttctggatatgtaacatatgttaattcaattgctcctcccaataagtttatgcagcatcatcatccccaatttatggaacaaaaactcaaggaatactattatctttgaggtcaggaaagatgacacagaggaggagacgtggcacaagaacaatgtatgcactctaacacagaaacagttcaaaaatcacatatataaatgaggcttcttccaaatccatggtgataattattaaagttaattcctgaatattccaaatattttgtaagatgacagcagatgagtgtgctgggaagcctgcagcctggatggagggaacataaggaaggagctgtcttactgacatacagagagcaaacattcaacatctataaatgggccaacagttaaggccccaaaattttatttctcccatcaagctgttacatattaaacctctcactacctcaattctcttttgtagagacctgttgaacctaagccagtaaaacgtaaaatgagcgattcttttggatagacagtagtagaaatataaatgaacttcatggaataacttctatcttgagatgaaggttatgggtatgtttctgcatgtgaaatgtgttacaagctaccatgcaatcggccacctgatgattcaatatgatttcccagttaaaaaaaaaatactgaagaggctacactctcaagtaccactataaaactttcactttagacattttcattaaatatactatgaatacattcgagagactaaaagaaaaatctcagtactcactagtcagtactcagtattttgagccttcttaaatacggccagagaactagactgcctcaaagcttcctcccaagttaacagtattaccattcaaagcttttatattactatgttttatacttctagagggagggttgaaactaagtcttatatgatgcctatctcacatagtcccacccaccaagtagggactctactacctgttgaacgtatacattccatggccttgtgcaggaggtttttcttttttgaggcagagtctcactctggagtgcagtggcacgatctcagctcactgcaagctccacctcccgggttcacaccattctcctgcctcagcctcccgagtagctgggaacacaggcgcccgccaccacgcccggctaattttgttgtatttttgtagagacggggtttcacagtgttagccagaatggtcttgatctcctgacctcgtgagccgcccgtctcggcctcccaaagcgctgggattacaggcgtgagccaccacgcccagctaggaggttgttctgaagtacctctcaagcaagatgattagaagttgtggcatttgcccaaataacttggcttttgctgcttcactgaaaacaacgcaggctaaattggcttgcagaaaatcagatatattcattcaattgttagaagcccattctccagcaatggcttcagtattctttcaagattctgaaacttgacccaatgacatctcgaacagatgccaatactatcaagataaccatggcaactttatctccaaaaatgtacttaagatataatttgtgtagtatctgaatgtctagtatgcctaagacactgtcaacagattaaaatgctgagttagaatgttaaactaaagaaggactacacactggctggcataaataaactgcaggtgtcttagaataaaaaacaaccagtaccggttggtaatgtgaaaaaagaaaaaaggttctcatcaagccaattttggtgaattaaacatcctaggactttcatacacttcttcatccatgatctgacagagagaagtacatgaaaaggagaagtggataagacaagagacgggtaggtggacattatgtagaaaatctcacataacgggatacctttacttaaatctttgtttttcaccacatgttctcactcataggtgggaagtgaacaatgagaacacttggacacagggtggggaacatcacacaccggggcctgttgtcgggttgggggaggggggagggatagcattaggagatatacctaatgtaaatgatgagttaatgggtgcagcacaccaacatggcacatgtatacatatataacaaacctgcacgttgtgcacatgtaccctagaacttaaagtataattttaaaaatatgtatatataaaaaaactttgtttttgtatgaaacaaaaaagctgttaagtcctttacatatccttcatccgaccacatcttcaatgtatagtgacacctaccaacaagttttgaaaaacacacccaaagttaaaaatggcattaaaacaaaaacaaaacaaaacgaaaaacctccaagaatctcaacttttaatttcacttaaactgtgacttttttcgtctttgagcacacagagcaggtcttcactgtctcttataagcaatagacagaagcttcctcatgcagaggttataaataaaaacattctgcaagctgctctccaaagacaaaaatcccgttgccctcagagagcagaccaccaaatagatgagaaaggaaatgtatagttaagaaatttttatccactttattaatttattttatggccaaataaaactttatcaatgacagggttagagggccatgtaggcagagaataatccaaggcaatggagaattaggcttccatactgaatgatgaagagcccagctgagccagaataaagatttctgtaggacactgacaacactagaacagtgagttgagggcagagtctagagaccttgaatgtcagggcaaaacttttatgagcagaggaatgacaatctaaatgttggtaagtattatcagacagaaatgtatggaaggagaatacagagacagtttcccatcataacgcaggtgaggagaacagtcaaaatcagtgtggtagtaaagttaaatgtaaatgccatctacagttaagtttccctttgtactataactagaagaaaaactgctttgcaacaatgttcagaaacccaagtcttctttgacctacttcatatagtaatgaaaatataatgatcctttcctctgtgtgtacactaaatactgcttagagaaacttcatcttgataccatttgtaaatacttaaatgagtcccatgggtctccacggatctttgcagagcaaggcaaatatgtttctacgagcaaattacttgatccacccaaaattcattcctattgtttctcttataaattaggtcctcactaaagggggataaatgtaaagtacagggctaggtttaatcaaattttcctgccaatcatttttgtagaaggttattacttgatagaataagtatactttatggtgttcagatgtaagcttctcctaaaaggtacacatcacgtgaaggcctctgtgcttttgaatgagacattcccttatgtgtaatacatttcttctttttccgcccaataaaacctagcttgtaaaacaccatcaactctgaaatcaacacagaggcctctagacagcaagtggcatatccattttcattgtattctgcacttactcatcatatatccaaataatggtcatataaactaagtgctgtctcccttactacacaatgacatcaaggacaaggctacctcttgtcttattttaatgctgttcaaacatttagcaaagctaactagcccacattaagcactcaaaatgtttataaaatatttaattacagatactccctgtccaacactgtatagccaagattacatggtctcagtaaaacaaaaaaacaacttgcaattaaatacttctcaaaaacttttacatttgcttatcctggccctttgttttgtgggcaaggtgagcaccatgcacatcttttaaagctactgacctttcctacaaacttggagacaggcctattagtcttgttatggttccatataatataataaagccctaaggggtgggaagtcttgaacataaagtaactacttctactaaatctttaacgtattttaaaaataggattcctcaaacacccagagaaaaattcctaacaaataatcttcctcttaaaggatgttttatgtcaacaatccccatttaaacacctgttttaaatttaaaacacaatctgcaagccctatctacattacaagtaaaccatacgctatccaagatttagtgttttgggccctgatttgacacaattatcagggatctaatgtatgtatacaggtatacatacacaaagaagttaggaagccagctcactttctttcaagggcagcctgtctttggtaatcctcaatcagtagaaactgtaccagttttttaaaaatttaaaaagcagtaacagcaaacactgcagattgcttatggcatttaacaggcagagatggaaatttgtgtaaggcacgtatgataaaggagaaagcaaggaaaaagaataacagaaatgttattaaaagccctccccacagagccaaaggaagttttacctacacatattttgtggggctgacataagttatgcaactatgaaaaatttattcaatacataaggggataacccctgaaacattagtgagtgttgttttatgactttaagtctaccaagatatttctctcacaacatgattagacattagagaataaccatagggaaagctttttttaaatgaactgatttgcaagactaatagtctcattcaaagacaatccttcattctccaagtatctattagacacctgagctgtatattccccctaacagctttaacaaaaaataattactgtattcccaaaaccctttgtgtgacagttgtgaagattttaaaagaaagagtttttaaggaaaacatggacaaccttcactgtacgcaataaagagaccatatcattgccatctatgcaacacctgcagaaatttaaagaggggcagcgaggaggggaactaccacctttatctttgttctaagacaaagtgttctcctgcttcagatctccagaagcaccttgagaatcccgtcctgagatatttaattacactgaatgatttggtaccaggccctttccctgggtcttgctgactgatagcatcaataacactcactggctgtaattaaaccgccaaatagtatcccctttgccacttggcagataaatgttctttaatactccaaagaacaaagtacaaaggtgagaggggtgtttttacccctcaccttcacagttcatctgactttgtgcaccaggatatacatatactgtagacaatgcatattttacaattcccctcagacattgcttaatgaagaacatgaagaaaaatccttggtttcttattaattcatttttgcaactctgagcagggggaaaacactgtaagccttttggcaagagtatgcactgctttcacatagctttggggcaacatttggtttacaggtcaaaagggtttctaaattaagtttgcatatagcaaaaaattttttcctttaaaaaattatagcataaaatgtgtggaagctcttataatagagcaaattcccatttattgaggccctggctagaaagctcaaatatcaagacactgggtagggaaggaagaggggtttggttggcaggctataaaaataagacaaatttttattaaattttaaaagccacttttttttttttttttttgagatgggagttttgctcttgttgctcaggttggagtataatggtgtgatctcagcttactgcaacttccgcctcccgggttcaagggattctcctgcctcagcctccccagtagctgggtttacaggcacctgctaccaaacccagctaattttttgtattttaagtagagacgtggtttcactacattgtccacgctgatctcaaactccggacctcaggtgatccacccgcctcagcctcccaaagtgctgggattacaggcgtgagccaccgcgcctggctcaaaagccactttcaaaacttaactcccaatctctataagacaccctttcaccttttttttttgagacagaatctccctctatccacccaggctagggtgcagtggtgtaatctcggctcacagcaacctccgcctcccaagttcaagtaattctccctgcctcagcctccggagtagctgggatcacaggcacccgccaccatgttcggctaatttttgtactttttagtagagatggggtttcgtcatgttggcggccaagctgatcctgaacttctgactgcccacctcagcctcccaaagtgctgggattacaggtatgaaccactgtgcctggccaagacacccattttaaatggataggccctaaagaaccatactgaaaattctccaaataccctcagaagcaaataaattatgctagcataattgtaatgttgaagtatttaatgacacacaaatgccctgaaaatgagcaaattgtgtgtgagaacgtgcattatttcttaggtaaatccagcactatattcattaaaaacacattagtgaatcccagccattcaacatatcttgatgtaaccgacaaatgaaaatcctattttttacaagtagacttgttttaaaataagcaccacagacctacccaagtgcaaatcattaagatccactgaacagtgtttctcaggtcaggccaccatctgcttaagaatcacctgtggtggctgttgaaatacaatttcctcagtctctctctgcagataatcagattcagtaagtcctggttggggtgtagaaatctgcatttttaatcaaccaccccaccccactgatcctgataaacattaaagtgttggcagtctcttgtgtaaaggcatttgaaataatcctcaaaactctgggcatattagggtttcctagatagctcataacaaccacggatgccaagcccttttccttgccatccactgatcgttagtttctaaataagacaaatgccaggtagcttgaaagcaaagcatttaggaatataaatcacctgcaaatgcaaaaatgcagacgtaaaataaagcccatgaaactcatccaaagatatttccaagaacccagactggctggatgtggctcaactgggttagcctcttcaaaaaggccactgtgcttgattctatgaagttaggagcttctctcaatgactctttctaggaatatgaatatggttatttggttaaggcaagcacaaatttctagatagacatttaacaaccaaaactagaaactgaaactttttctgaattattagtttccaggactacatgcttgttctatttttccttgcccttcctgcagctcacctgatcaagaaaccaagaacagaacacaaatccaagacttacacctccaagtcctattgcagcattcaaaagagttcttcacagaaggaagggagaggaggcaggcaagtatcagatttcctgtactgttttcaaaatacagatgaccctggaacaatatgggtttgaactgtgtgggtgcacttaatatgggattttagaccaacccctccctcttcctctgcctactcaacataaacatgacaagggggaaggatccttatgatgatccacttccacttaatgaacagtaaatatattttgtctaccttatgattctcttaaccttttcttttctctagcttactttatattgtaataacacataatatgtaatacatgaaacatacaaaatatgtgataactgtttatgttatcagtaaggcttctagtcaacagtaggctactagtagttaggtttttgaggagtcaaaagttagactttttgctatatgggggctgctacccatagcccccgaattgttcaagtgtcaactgtacagctctgtctcattgcccaaaagcagcatgtcaagacacttctggaaataaaacatccacaagtaattctaatgtagtacatgcgggtgagaacacacactaaaagtaatgataggaatggctggcagaagtgaaaataaaagaaaatgcaccatccatgcttttttaaagagtctacgcaaatttaaagagagaccaatgttaacacacatttctgtaacctttaaactagcatctacgacttacatgaacctaccagaaaaacattgtcgaagaatgcgtagctgcctaaaaaataatttcaggaagttactactataataataattttactgttcattacaactgaaataactgaatcaatgttaactcacttatctgctaagtatgacctccagatccagttttcttctcaaactgtacgtctggctgtctcaagtgctcactctgcaagagggcagagttcttcactcctaggcaaagacagctccactctctggcacctaagagatctggtccagaaagtctcaagacaaagacactcaaaggcccaaattaaggcctctctcagttggtttatttagagtggtatctgagcaaaacagtttaacatcaataatgtgaaatggaaagaaaacaacaaaagctacggcatcagccaacatgatactacatttctgatgcttattagctatttcattttgaacaaatcccttttaacctgagctttatttcatcaaagggattaagtatttgcctaccagagactactgctgtttctgcacgaattcaaaacagtaaaaagataatagtcctatgaaatttgtttcaaaagtagatacagcaaagaattaagggctccttcttgggaagttaacacaatcatcttaacttcacaagccaggtatgtggtagaacagactgaagccaaactgacctagcaccacttttcccaggtgataaatgaaagaaaagccctaccccacattccccttaaaaagcagtgggaaagtaaagcaacaagggctagcagtgtgatgttcaggtagaaaagatttttgttttcttcttgtaaatttgtttgagttcattgtagattctggtatgtttattgcggcactattcacaatagcaaagacttggaaccaacccaaatgtccaacaatgatagactggattaagaaaatgtggcacatatacaccatggaatactatgcagccataaaaaatgatgagttcatgtcctttgtagggacatggatgaaattggaaatcatcattctcagtaaactatcacaaggacaaaaaaccaaacaccgcatgttctcactcataggtgggaactgaacaatgagaacacacggacacaggaaggggaacaacacaccctggggactgttgtggggacgggggagggatagcattaggagatatacctaatgctgaatgaccagttaatgggtgcagcacaccagcatggcacatgtatacatatgtaactgacctgcacattgtgcacatgtaccctaaaacttaaagcataataataatttaaaaaaaaaaaagaaaagatttttggccatccagatcagtttcaatttatcttatctcactgttatcttagaaatcaaactcaaacacatttgaacatgtggttcaactattttcagtgtcttctatcatgatgcacatggtttgcttgaatctcttcctcagcctccttattattcggaaaccaattttgcacttaacattctagacctgtgagctgttataagggttctgcctcaatgactcaaatttctgataaacagtaagtttcagtgacatccccaccacatgcccctttcaattccacacgtgcacacacacacagacagcaacaatttcctaaacctatacaagttattacttctgtggctttccccctaccttacacagaagcaatactcacaaggaggcagttactcttttaattccaatggaggtcttcataaaacctgacattctccatgctggttacagaaatgaaatagccaggcttttctggtatagaccatactttgcataagtttaagcatctgccatgaggggctatgatacccctgtggagcatgcttaggtaacaaaatgatccatcaattccaataaagatgggttcagtcaactgttgagactcttctaccatcactatccactgtgtggctgacaggcaggaagtaagcaggggacactgccaccaagaaccctgttcctcatccttccctctttgtaggctctgcctctgctccaacaactgtgggaaaatctaaaggaaatccattggaagaatgcctagttattgccctttgagaattccaattaactctcactttggagttggctaaaaggaacagaagtaacacaagaggcctgaggacaggacattcaagctctggaccttacttgggctacctacccacattccctagaccacattagatgagtaagaaatttctgggctttttgtatgaaaaaaattaaagctgacaagagagcattctacaaaacacatgaagggcattatacaaataacaataaaaaagtcatctgtgacttctcacttcaaataaggactatgtaaatgggactcaatatagatagaagcattttatttaaatgtattgaagaggtgctgataatcagatgtaatatactgttaaaacttgacatgtggctgtggaaatttccagaatacaagttaacaatgaagttaggaaaacatgtactcggtcagtctgtattttttaaaaggcagaggaacaatttactcaacgtttcaatttttaccccactcctggcatatactttttcaattttttttttgtctggataaataacagttattaggctaacatctcataagtaggtcagttaatttgaggcctgttcttccaactattacttctaaattttccaaatctgctcaaggtaaaggtttttaaatgaggggtactttgtagacgatgatttataaatttctaccctttgtaccatcacaggaaataacaaactacacaagccagaaaaacactagggtgggttgaaatgctgagaaagatgtggcgtttaaatacaaaacaaaccttcctctccgaataaatactcaaggtcaatcccaacactactctgctcaaaaccctccggtgccccttcctcacctagagaacaaaacatcagcgccttcacatacatgcgcacccagaacacacttctataacgcataactcaggctcatttcccacactcgcctcccatcctgctttctttttgggcaaattctatatggttcccctatcaactgctttaaaacttccatgccctactaaagtcatgaactcccagcattatggctattagagccactcgtctcaaacacagaactgtgctgcaggtattttaacagaggacctactgggtggcaagcccttagcgtagctttacttacattcctgcctgcataccctctcctccttctttacagtgggggctggtttacacagcatctaagaatatttccttctggccagtattaacttttataaaagaacaaattataatgataaagaaaaaccaacccaatcccaataatcctgtcgcaaaaggaggttgaactagaaactcaaatccccatataaagtttacagtggctattaaactttcaagagtgaaagaagaaggcaattaaaattattctctcttcaggagaggttgctgcttttcatcaaatcattttatgcaataaacatgaatttgtttaaaaagttaacatttcttcttaatatgcaacttagcagaccatgaaaagctttttttcctctcctaaaaagcaggtaatgaaaattctcagtgatgaataaattattttaacgatataaatggaaacttaaatggttaaaagctctgtccaagattaagcagccagttaaatcattttagtaaggtaatttagacagagtaagatttcagaaatgtagttctatattcctatgttaagggtcaagctcatgctgaacagaaaaaaaaaagtataaatatgacatttactaatgaggaaaggataagctagttagaaaaaggtataaatttaacaaaaagttaatggcaatacagtagcttagaatacaggtttcttaggtttgcttaatcactctcaaactgaacacaaaaaatagataatactatttataatattctcatttttataatagaattttccaaatgtggttaaattgtggtttatttcagtataagaaatttcatgattgtataccaattaataacttttaagcaaaggtaaattttagcctggtctatagctgaatgattaaggaaaatatttctttaatcaagaccaaaatcgggcagtttttctatggtagttaattctagacagaatttttttttcttttgaggggtcagaacttaccaataacaataaaacattctattccctgagataacagctccttctttccagataaatcaaccccagtttcaggaaaaataaagcatcctaggcccattgtagaggagggaaaagctgagagagatgctgggagccacgtatccatttcactgtgttatgtgataatcacctatccagagttctttatgcagaggagggaggaagtctacacatattcttggaaatgaatgattttagtttgctaatcatgaatttaagtctgacaccgttaacctaacaagtcaaaagtattggctttaagccataaaaattccacatactatttagatttttttcaatacttaagacccctaaaaataaaatgagtagagaaagagcatgaagactgaacacagtaggtacaaccactcacttcatgaataactcaccaaaggaaggattcctttagggacctgaaggatcttggagaaaaacctctcttcttctcaccagcatacaacttgacacttccatgagattactcccccacccccatgcctgaactgtacacatatcaccttttcactaccttccctaatgagaatcttaaaacatttttgtaatattcacactttatttaccatgtcaacactggggatactgtgggcaggcttaacccaaaatagctgcctcccatgcagtacagggatgatgtcatttcaccagcaaggtatgcctctgggacatctccttaaccaggaaaaaaagtgacctttaggacaagagaacaagtatctcgagactttaacctgtatctgctactacttaaacaaacagcatcctactatgagacggatacgttgttttcaatttctatgccatgtttttttataagcaaaggctggtgaaccacgttgaactctgaatgctaaacgatcgcccagcatgctcaagaaaaaacattaatattttggttaacagaatgaaccacaggaggattattaaggtaaaatgctagaagacaaactgaactttgcacacacaaataccaaatgtatagagaaccgccaaacatctttggtgattcccaagtgctaggccttagacttgctgtcataaattacctgggaagcataataaaaaacagaacccggaatctcacctgtggacagggatcgagtagatctacagtggatcccagaaactgtatttctaactcacttcccttgggattaagatgcaaccaaagtttgggaacaaatgctttaggtcctcacagagcctgagggacttcacttcactcaccatggaaatactgaacatctgtcatttattcaacacaccaactactgcacaaaaccctactgagctaatgctattagggagccccaggagaaactgctaaataaaccacctttcacagcacttgattcactgtttcaatatcccaataaccaggaattttaccaaacgcatactaaattctaagtggcttggagtacacaaacacttgtatatactaaccaatcttctgtacctttctaaagtaaagcacagtgtcctggcaagagttttgatataacgatcagaagacaaggatttgtttgagtcgcagctctttcttcaactgcctggtcttggctaaattgtatgaccaccaagatctccactctgactgtggacagagaacagtgcttaagcctaaattacatatgggtccccctgtaattccaaaacttctgtggttcctcaagggtaaagaatatagacttcaaagaagggggaactcagcaggagctggaacaacctggaaagacagaagctgaaggacagaattcctttagatgggctccaaaagatgagatgaccacagttaaactaaaaatgagtgtgaaagggtataccaaaaagtcggagctgcaaaagcatatgcatggacgctgggagtaagatcagcttacaagtaaagagccagtctgagaacagtggagaacggcaatagcactggcatcactcctacaaaactcagccagatgatagggtaaaacagtagagaaacaccatagagttttgagtgagcagtaacacgagtaaagtggtgctgtgtaagaaagtggtgctgacagccatcaccagtatagattagacgagggaaaaagacttatttatggaatagtatcccaggaaatgaaaaggcttaactcaacttccaaaacattcttaaagctgtgaatactagaaaaacttggctcaagacattgtacaagagcacaaaatctgtctaatggaaataaataaacatagaaagaacaaacaggcaaagggggtgctatatacttgtgggaaatggtctgctttgcctcttagacaaatgtgggccaaattgaggatgccagctgttatctgatatttttacaggaaccaaataggggcggggaaagaagtagcctgctatttgcccattaccctgacccacatctcagaaaatcagaaactgatgtcacactataaaagccacaaagctttactgtgctttcttccacatattcagcccaagcagctgggccctaaagagaaaaggctggatgatgaacagtaaggaagcagctgtcatcaactgtctccttgaaggccacgggcatttctcctgtggagacctatttcccctgcatttctaccttcttctggatcttcgtgcaggaggatatttagtaaaagaactgacacactagaatgaaataagggtaattatttctagaatggagaaaaggatagttcctgggacaagccatcttgaccacctattccattttcttcccaactacaactcaggacctcagaactaggacaaattagcagcaacgctggaaatcaatataaattgaggaaaagaaacctgcaaaaatctgctgtaggataaagagcacacggtctgacggtaactgaacactggatgtctttttaaagaacacttattgttacttaatagtactagtaaaagatctctgacacagaaagtatgcagagaaatatagataacgagaaaaagcagttcagactgaaaaaacttcaaaacaaacttgtcttacactttattggaaatctcatttttcccttcacattttgataatatacagtaaccagttcattttctgattggtgaatcttttcatagaacagtttcttgctcaagaagtatctagaattcttggacctctcataccctagtatatttgggaaccactatatactttcatttagataagacagggctggtaggcatttttcttaggggccaataaatataaagactgatgtgtcaaaaccactcagggctaataaattaccttaactggtaattctaagaaaagcaactttaaagcacaaaaatgacacttcatttccagatacctgaaaaaaatgagcaaaaatcttttacacaagtctctaagcaagatggatactacagtcagccttgactaacttcccctcaccacttcaggctatagtctgagctggtttcttaaatcaagggtggaaaataggttcaaacttgagtcaattgatagaagttgtctggaacactattttgaaaaaaatatttgggagccacatctagactctgtgagaaagagtgccatgattgactggcaatgtctgcactgggcaggagagggcaaattgatggtacagctaactaagaatttgctagaggcgacatccctcttattttctaaaggaaaagaaatctatgctgtgaattagattagctccctctcaagagagaatctacataagaatttcaaagattcacaaaagcagcaaagtatgtacaaagttatttactgtacgtcttaaaaagaaaaacaacagaaaaaataacctgtgtcatgtaagttcctccagtcagtctcctcaaagcaagctgaattagctagagcaaactacaactcaagcaccacatctagcctgccacctttttgtataacccatgagctaagaatggtttttacattttttaacttggaaaaaataaaaagaatatttgtaatacataaacatcttatcaatctcaagtttcattgcccataaataaagttttattggataacggctgcatccatttgtttatgtagtggctattactgctttcatactataaaggcagagttgagaagttgtgacagaatgcatggctcgcaaaaccttgcttattcactacccagacctttatagaagaacaagtctaaggtttcctcaagttatagggcaagtaattctctataagggaaggagacttgattccgtaggcttcctataacatttatctaagagagttgttgctctgtccccctttgcgaatacatgaatgattatacatagcactcttgaacaaacagtttcttccatcttgcaacaaacaccaaaattccactatgtctcccaggtaactgtttatatgggcccaaaaggaagaaaggaaagaactacaaataaatcttaatttttttaaacttctgttccgcaagtagatataaaaaaactttaaacatacttttattgttttggtttgaagtctcaatccattcagggtgttgatagctttctctgcatccttggggtcaatgtagttcacaaagccatatcccaagctctgccctaatgaaaaggaaggggaaaaaggcatatattagttctatactgttgacagagatcaactttcattttggcatatggtcttgtcattaacaccagcatatttcctcaacagtaaaaagaactctctattaattctagaaatatacatgaagtctttatgtctcctgtctactacattttcaagttttagaactcagcaagcagtgctgtttaggaaaaaaaaaacacacatccccaaaggattccaccatccatgccctgcctgagccagagtataccatcagcaagacaaggtcagcttcataaactgtggggataaatctctgtgctatggagagggcttaacaggcaataccttttcagcttcagtttccttagccataaaaatgggaagacagaaaacatcaaccaagaatctgtcagtgttcagtaaattgtaccctgacatatttacagcctttaccaagtacaataatgtcggagtctaaaatggtgaagaaccatgtgtgggcgtgtatacatgtaagtttattttagacgagggcttatcttcaaatacactcaatcaaatttctccaaagagggttttatgatctagataagaacaggaaaatatgaacacaaaagacttacagggatgacatcgaagacaatgagaacatataggaaaagaagaaatagaacataaacaaaaataacaggagaaaaaaagtctagagtaaaagttgcttctaagtgtttgttgttgttgccaccctccccccatcatctgagccctctcactcctggttcactgatgccctagatctcagacaatgggagctatcaaaagcagttgcatcaatggaatgcaaagataactaaagtcaatcgcaatggtctcaacttttcaatgaagcaagtttctcagtttgaaatggcaagaaacattatacaggtgacaaaaatggcataagaaaagtttagtctacaaaagtcaaaacaaactaaatgacgatttcccagatgcccaaggacggtccaaatgcttttactaagtactactgttgcatcaatttcatagggaagtgaggtattttttcttgatggggcaccgtaggtgcaagtggttatcaatgtgggtttttaggacagctactctggttatcctaatgtggatacttgttaccacataaacgaaaagagaaggctaaatacagtgcccaatatgaaaactagtgattatattttgggaccacaatcagaattttggataatcactgctaatatatgtcctctatcaaaatgtattttttcctttttaaaaaagagaaaggaatagagagctaaaaactaattaggttaatttcatctcacactaaaattgaggttttattttacagttctagtaaagagtcacatgtgaagccactgtatttttaagcattcagcttttcattaattcaaaatttatcatgtgtttactgcatgcattgtgcccctcttatgaaaatgtgttgcagtcctattgtcattgagtagaattaaattggctgaatgtaacaaaatctgctcaaggaaccagcttatagtggaaagacagacttccaataccggctctggtgtttactggctcgcagttagctgtgcaactttgaagaagctacttaacacctctctgaaccacagcttccttctctctaaaacgagggtaattcctacccaactaggttgctgatgcaatgatgaaaatattcattaatgatgaaagtggatcgtcaccctagtcaaaagataacatgagaaaaaataacatgcttactgttaaagattttaagtatattcatttaaagttaaataaaaaagatgccacaaatataacagaaaaagaaaagggcaatacaaatatagttttgtcatactgctattctatgacaaaataaatcaattgtatcagcatagtctaattgccctttctactgatagatactcctcctcctgcatcttagcagcttctaaccccagtgcattctcaaacttgactgcaatggaatcatctagaaagcttaaaaaaaaaaaaaaaaaaaactaaaacaaaaaaacctgatccccgaatcccactcccaaaaatagatagatatatatacatatatgtgtgtttgtgtctgtatatatatgtgtatatgagatgagatctcactacattggctgggccatgcttgaactcctggactcaagcgatcctcccaccttgggctctgattttatcagtctgtcatgaagcattggtactagctttttaaaatcctggtgactaacgtacaaccaccatgttgagaaatcactgccttaatggtgagaacctagctggggctacaacggggctgctgggaggtctaagaaaggtcttgcagggatgactgctgtttcacagttgcgttgtttaggtacacgtggatgtgtttcttctaaaatcttcaagttacctattacttcaaagaaacagtttattggcctcctgaggtctgtctggggcacaagagtgcctactgagattagatcactgggtaaagtgaaaagcctgtcttgcttacttcctacttagctgtttcccactctagcctctgaacccttactcctggcctgctgtaggcatggaaacatttgctaaatgaaagaatgagaaacttactgatgttatttatttaaccaaaggtattatcatcatcaccaccaccaccatcagaagacccaaccatcaaatgggtcttccacctgataccctcaagcaatcatgactagctatatgagtcagtcaaatatctagtatctgttaagttgtttatactcagaaatatttatccccaaatgactttgcctccttataaaaagtttcttatttgcctagtggcattattaggatgagtgccactcagaatatgtttgaggtaagcaaaactgtattattatcctaagcaaaataatatgaaagggggtatctgctattaaaagactgcattcctaaacctaccatcgttggtgtattaaaatgttggcactataacaaaagggagttagaactttaaattactttacagtgaaaatctgtaatcaaggcagcaaatatttattggatgtttaaaatatattaagggtatcgcagatgataccaagataggcaagcctccccattctcaccttttagctacatggtattttactgtttaattgtagcttcacattaaccatgttcggtattcagattcttctcctacaaggtagaaatgatatctgaagcttggcaaggtcaatcagcttctacaaatcaaaaaggcagggaggaagtagtaaagtcaggacttgaagtcaggactttcaaatgctgtgctctactccactcaattaactagtttatacctgaactgagacttcaggcatattgcgtataagcccaggactagtttgtacccaatatgcctgaataataacgtaaccaggcacttctgacacttttaccgcaaaagttgtttcttgtttgattactatctcaaacttctgtaccttttatacaaatatcagttttactatatatgaatttcagtgccattattcattcctatgacaacataaattgcatcttatttatatagtgcatatttctggttataaatgagcgcacagtttttaaaaataaaagcagtagcaaggcaaacattacaaaaaaaaataccttacctacccttttcccactcttatattcatcagtaagtcatgggccaccagggaaggcttggaaaccaagcatcacttatccatatcatccaaacctatttttcaagtctctctgaatttagaatgtgcatactgataatccccaaactaagattcatttctttaaaaagttttataagatgctacatttaaattccaagtacaaccattatggaaaccaacatgattaaaagactattctgaccaaaatgacaaagctaaggctcttcaaaaaaaaaaaaaaaaaaaaaagcccttaagaaaaacaaatcctgtctttaaatgccaaaaaatttgcctggtaactgaacataaagaagaggctcaatgccacgtgtcctcagctattctcagaagctacctgtggtcaagtgttctaagaattttcaaaccattaattcaaatctttcttcttttgaggcaaggtctctctctctgtcatccagactggatggcagtgggcatgatctcggatcactgcaacttccacctcctgggttcaagcgattcttctgcctcggcctcccaagtagctgggattacaggcatgcatcaccacacccagctatttttttgtatttttagtagagacagggtttcgccacgttggccaggctcgtctcgaactcctggcttcaactgatctgccaacctcggcctcccaatgtgctgggattacaggcgtgagccaccgtacctggcccaaagtcttgattttaatggccttggtagggattctagaacttttgctatattctgtgctgcactgttgtgtatgaatgccttttgtttcacacgcttctttttaatctaacatacatgccacagaaaagaaacccttcttcacaagagatagaaaaatagtttataagatgctcctggcacaaggagaacagttataaacaggctggtagaaatcatggtcaagggatctataccacagagctgaagcactccagaggcctctgaagaggaccaaagactactgagagcagggttcagagcaaggagaggaaaacaggaagaaaacccgtttagtggcaaagtgctactgtgggaaacacagtaaatggcaatatatcccaaactgtgtgtaattcaaagcatcagctattcccctgccacctacattgttttaataccctactttaattaaaattttaattgcatattttaattaaaaatacacaatcttctggacctgtttcattcaaaggtcactttatttagtcttttctattttaaattactaccaatgttcagaaaaatcaaattaccccctcaggtttaaaggtaaaggcaatagactaccgtaattcttgattaaaagtatattaactttatccaaccaatattaaacaagaccctcaacacaaaattgtggaaaataaaattttgtatttaaaaaaaacaagagtcaccctacaaatttctcatctacaataagcattcaataactatgggaaccatactttttgctaggccctgagaatgcaaaggagaaaaagatctttctcataaagcctatattctgacaggaacacattctacagggtattagaagaaaatagagctaaggagaaaaaagcagcagggggtgagagtggggaggggaggagcagggctgctgtttaaatacaatggtcagagcaggccctatcctgcaggtaacatttgatccaaggcttgaaggaactagctcaagtctaacagtgaagatgtgcaagacgttccagcccaagttctgccacacccgcatcacgttctgccagtcctaccagctaaatcggccccttgtctgcgttagcattggttctctattattctggccctgatcactgctacactatcctaataggacaacccttgcttagactcccattaattccaaaaacagccatcctccaccaaaacattgtccaggagaacttcttaaaacacaaatctaaccatactctggtttccagtcactgtcagttttttgctcacttctactttcgctcatcttccaccactcctacacatacaccctaaaatgcacattcagttctctatgtctggaacacagctctccaactagccaactcccatgtatcctttgagactctctgaagtcatttcctgccacaacttgccccatccccagtgcacactgtacagtgctcctctcgactagtcctcccacagcttcttatattattccgttatctttgttatgtgtgtctggggtccatttggatgctccctcactagactgctgagcaagggcaagcagaacatagttcctgacaaggaggaccctaagacagatcattaaatgttctgtgaatgactgaatgaaaaacaaatgaaggagcagcagcatctgccttccaggagcctgtggtttaggagatagttgcccttataaacatgttcctcatgtccctacattgtaccagatggattacagaacttgtggagacaagatgctcaaatgttatagtaattctgccttcataaggaagtcatacgagttttaaatagttcatgtaaaattgttcatacgaaaaatttctacaaataccattaagatgaagtctcaattttaaaaagtgtcatctagagtaatttgatagatttacataaatctgttccacaaatcggtaagtatgaattatgggatgtcagcatataattttgttgaaagtactttttcactaatataattaagtctgctgagactattcatgtacaagtcaaataaaatgcagagtgaattctgtaaaaacctggtagttgaatcaacaataaaaggtgactacactgattgatgtgtatctattattccatttacagcagtagtaatgttttatgaaataaaagaataaaagccgtgtgaatctttttcaaatcccacagttagcagaaacaggtcactatggtcctctctgtcaaggaagacttgcaacctgaggtttaataatgcaatacttttaaaaagcaaaatggaaagattcgcttcctccaaacacagctcttgcataaaactgcatgccttaacgacaaaaaaaagcaaataatttgatttgcaaaaacaagttttcgttacaaagggggaaaatttttgtttttaataaagaccctgttgcctcctgatatccttctctctcctccctcaaacacacaataaagttgcaaatatattgtatttcttcagatggacttactgttcttgggcactcattatgtgtgtctgttcagacaggctgtgcactgcaactctggcaccaaagcaactcgcaccagacttcacaaaggagctttcttaatatctcagatctgatacacagcaaaaccatgtgggtaccacacagcagggaaaaggtttgagagaatctcagaacagagggatgcagttctctctagtcacgtttttctccacattttaattcctgacttagcctgagtctcctcaaatgtagcatgccagatgcagcaggtccttccatttaaacactcaagttaaggtgggtcaagttaaacaggtcttccttgctgccctctaatgagtaagatcaaattgtgagatggaggactggtgagatcctattactacagtccaagccagccttcctgaaagctgggagcatttctaccagcttcccaaaggacattaccagggattatcacaaggatggagaattcaacctagacactcacataatacagaaaacagatggctcactcgaagactcatcttccacccaaatgctaataaagctggcctgagactgaaaggccccaaagtttctaaatgattttcaggactttacagatacatggagctaatatagaagagtttaaatcataacttttctgctgaaatcaaagctgcaaatagtgatcatttggtaaatattacctaagcagcctaattctagagagagcggttaatgtcctcagcaccagggcattttcccttcaagttaattttaatagccatatctgtcccctgattatgcaactggtagagctctattttcctgtagttccagtcccagtaattatgaatctgctggcaatgcggcatgaccctgcttaagttggcgatactgtgggttcttaatatatcacattttcagacaacattaagaactcccacacaattcagtcttagactattgagaacagaaacagcatattaaatcctctaaattcttgccaagtattacaccgggtacacaaagatatcttgcatccaagaccaggaagatgaggaaaaattatgtgcagtaggaaaataaaccaattcctctacaacccacaggatgagactctacctgaaagcaggttctccagcctgaaagaaagtgactgagatagtgtagcacgctcagcaccacaatgaaaacaaaaggcggttctcatcacttattgatataggtagtttctctaaaagataggtcagcagttctaccttcaaacactggagctgccaccaggatagagcaaatgccaaaataccttcagatagcctgaaagtcatacctgacagttcaaaaaaggttaggacattaacaactctaggctagtccaatctactttcaattaaaagtttgggtatgctgcaactttctcatttctttgttaattataattaattctacacagatccgccaccgcccctacccccacccccacacacactaacagtcttatattatctgctttatcttgtgtttacttaaaagacaatggagttgttcaagtatataccatttgggatgaaggcaaaggaactgtattcctcaaaatagtattgtggtagaggaaaacaagttaactgtggtagtaaaaagggcatctgctgttgcttgtgcgaccagctggtgtcaatcttcacaaacatgcactcttgcctgtgcctgcacacacacacgcacacaccccccccactaagcagtccatcaagaggcagtacagcttcttaatgtgtttttctctctgtacaagatcattttttaactcagataccacaagaaacaaaaaatttaaaggccctgttttgaaactatgtcagagtccctgcaaaccaccatggagagctccccattttgtcaagaacgggaaactataaaattagactctaacaaactcaccaagtccatgtgaaacaaaaattctcgttagagataaattttcttcttgaacacatttttcttaaaaaaatcactctctcacccaaaagttaaaggttcaccagcccaaaccttccagtatgaaaaagtcagtaagtttgtcggggaaaaatgcccattcccactgccccataaatgctatgtctacctgtctggcagtcaacagtaccactgccaaactaaactatcaagcaactaggatccttacattacatatatcacatttaattctcaccacaaggctacatgtaaatacatctgtatccattttacggacataaagttggaggttcaaagatgctaagttaacttgctcaagggcacacacagctagctcaaaggagcagctgggtttccacactacaatcaacctttccaaactcagtctttcaaaagtgtacactttgttgcctttggccatgtgtggaaattactttgtggcagaatcctgtacatccaaagtttacaactttccaatcagaatatttataatctccaaatacatctgtatttttttcttgttctttgtcatgaaataaattgactggaacttcaattctttcttaatccatccaagagactatctgtgaaagaaaaaaaaaatgacctgaaagaaaaggaaggacatcctgcaggtgcacaaaccacttaagcccccaaaacaaatccatcattacaaaacagatagatgagaggtatctgcattataaaaagatccatttaaaatgggccttgatttacatactccttttccaaactcagaaagcagttcttatggctaaagccaaacatgtttgctactgccaaaacggtctcccacacaagacatttctctcctcagcagattgcattaaaatgctttcatacgcatagcatgatttcatagcggtggaaaaaagatgggatcaataccacatggtctctgccctctaagatgctcaaaaattttaagcccaacacagtaaacaagggagagaggcaggcacctaatgaacatgaaatacataaagtgcatcgcaggggtttcaggcttaaccaggaccagcttgaaaaagagaactctttagtgtgtcaaaacagagaagatgaaattcaggtgtttcctgacaaacaaattaaggtaataggaacatggagaagaacaaatttgtaaagaagtataaaagagacaagccaaaagcatactacgctgaacgtaaggcatctatgtagaggtaagcaaaccgaccccccatcctggaagcaagactggcccatgtgaaggtttacagcagacaaactgcaggatgcaccaagcactgaggcacaatgaggaaggaggcacacgagggacccagggacagtcaccttagtggcctggtataatcactgagcagatgcagatgtaagactgtaactagggacctcagtgttagaaatcacccacattctttttccttcttccctcccctctcaactctttattccttccctctctagacactcccccttaggcaatccatgcttatctacttaggctcttaagaaatcccacaggctaatcttgaaacaaaccaggaacagagtccccactgcaaaatcctcatgattaggaggagtcataattagtccaccaccactgagccaaagtcaagataatgccaattagaccttcagacacctgagagagccactgaacaagacacacagatcctgcaccacttctgcacgtctcccatacctttctccctttgaaagccctacggtaaatttttaaattgaagatggtactttagaatactagtttgccatcttctcagtttgctggctcccattaaaaatgcttttccttccaccaatccttgcctcttgtgttctggctttcaagtggcaagcagctgaacctgggttcggttacaggccttctagagtaatggccaggattgaaacctagcaactccttgtgtcccaggaggatccatacttccttggcatgataacatctggcctttgtaaaagtaactagaagggcaagaaaccttttgaaccataatacccagagattaatacaacacaccaactcagcagccttgaaagtattcttgcactataaaactaacagatatggataaccccaaccaccaaaaagctaaacccaagatgactacatcaggcagggcttacgattttctgagacctcctttacacagctgtaaaaacaagtacctcaatcctctttctgccccccgaccaagctaagctgctattatgagtggacaaagtgttaataactaccacagtaaatggggaaaaactactgcaagtgttaacaaaccttatttttaactgagtagcaactgcaaaattacacatgccttgtgaatgcacgtacatacctacgtccttcgcatacaatatggtgacatcaagttagaaaaggagtgaaagagggagggaagctgagtcattaagaagggaatattgggtagcatcacatgatcaggtgtttcaataaaaacatatttcaccttatgtgtactgatcataaagtatctgctatagaccgatatgtacaacccttccaccggggggaaaatgtccactgtaattccttttatatcaaaaagaaagagcagaattaaattagaggtatttttagcaaagacaaaggaagtaaatttccaaaggacatccatcgtccccagtcgacacaaggattaagtataaataacgtgatttttcttctctttgtacaggacatgttgcttagtttatagttaatgaagaggtagttaatcaagagggtaggaggaacatttttctttctttcctctaaacttaaaatagtcacacacagcactgatttttacatgcttaggaaaaattccaaaacagactgatggtgtttgggctggtgggggtataaatgctgagtataaaggaaacctatttaaatactacagacacagcttcacaaacctcaagaacactctctctgaagcaataaagaaaaggaatcctaatggaacacagtccccagaggaaattgagctgtacatggttaaagttgtaaaggctatgggtcagatgggaaccatggctacgaattaagtcaaagaggtaccctgacagaaataagtatcaattttgtttttgctcagggacagcttatgctacagcaaaccactctgagaccacagggcaacttgcccaccaattaacagatggctcctaaagagaagtacaaaatggtgcagctcctacgattgccacattcatatcacacataagcatttcttcccaaatcacctcatccaaaagttgaagtgattagctattgtaatcctccaaatttaaaattcacggatactttgaggaagattttgctaaaaagattttacctagacaatgattcattaggacacaaaagtaatgtggcaccatccacatcagcatggtatagtaaacgcattatcctgccgaatgagcagagcacagaggcttgtcttgtcttttaccactgactttaaagtatattaaaaacgaactatctaaatcatatacccagcaacttagtacatctgaccattgctgctaattctggatacatctttcctatgaaacaggaaaaacctaaacacaaaaataattttaacatattaccattttatcatctcaagtactcttaaatgtataacagggtagagggttaaaaaaatcttattcaacaacacttcaattttaattcatcttaaaaacttttaatgtgatgctttctttaatctgctgttactgaagttactcgatttgcttattcacatatctgagacccactcttggggaaggcgctatgtttttatggcaccagattaaacaatatgaaggaccatctgatgtgggaagtaacttctatacacagagcttctcagctatttgggccacattacatgcccacttggcaaacacattttaagattaaggctaagacaagtggatcagaagaatccatcttattaccacaaaggggtccctaaggaaaaggaggttaggagtttaaggcctccagctaactagccttatgaatttgagattgggatctcatctgtgggaaaagaaactgcactaaaggtactctctgatgctcgcccccacctattattctaccgtctccaccttaagtttcacaaatagattctgatgtgcgtgttagaatcactcttgttaaaagaggttcctacaatgtagaatgccatacaaaatgttaggtattcaattacaagtacaccactcgaagaaatgaatgttttactaaataactagtttttcagctcattccaatattcaatagcctatgctgtcaagagttttcctattttgttgctgaaaacttcttccttgctatttctaatgaaggaataaaatagttatatattataaactaatctcctttattcagggaaaaactttaaatatgtatgctgccagatcacttactagcccctgtacccaaacagaatataacctattaagtgcttattctagttatcctaattgacaacaacattattaaggattctacttagattataaactttatttttctcaagcaagagtactttctagcaagaaaacatatatatactgaaatggatcttaacacaaaagcctactatactattttgggcttctttatccttctcgcgcaccccccacgaaaaaaaataaaaataaaaataataattaaatctaatagtaaaggaattagaacttttacctcattattccctacaaagctaatttgttccttcatttgcactctctgtcattgtaatctatgacttaaagaaaatgaagcaaaaaaattcttttaaaaataaacaaaccaaaaaaacaggctgggcacagtggctcccaaataccagcacttcgggagtctgaggctagaggatcacttaagctcaggagctcaagactagcctaggcaacaatagggagaacctgtctctacaaaatatataaattagctgggcataatggcacatgtctgcggtcccagctactcgggaggccaaggtgggaagatcacttgagcttgggagcttgaggcttcagtgagctgtgatcacaccaccacactccatcctgggcagtgacagagcaagactctgtctcaagaaacaaataaaatacaaatcaaataaccaggaactatggtagatttttacaatccccaaagaagaatgttttctgaatgtataatctacagccaaattaagatattatacaaagattttctgtgtaatcctctataacctggtattatcttggccaggtcattcccctgccctacccaccaccatcttttcactttaagctacctgaacagatatcccattcaaatcctttaggtgtacacaaacatcttaataggttgcaaagaagaacacaaaattgactagattcttttttgaacaattacatttacaattcaccatcaatgacttacttgctgggaaaaaaaacatactgtaataaaggtaaaactagacttgcatcttttcaaggagaaccaaagactgtccaaaaacctaatgatgacatatactacttatcccataggacacagaaatataatgcctgtaagcatacacatgtccctacatggctggaaaccaaaagcgttaactgaagggttttaaagaaatgaccactaaataagcagaggagataaatgtaggtcattcagaggcaaatctgttttaccacaagatatatggctctccttagctactaaaagcaatgggagtcaccaaacattactgacctctgaagactaaaagctagagatgaaacattcaaaaagacctgctgtgtgaatgctactgctagtagtcatctcagtcattcttcaggttgttcttgctcacactcagtgagcaaagtagtgcccaagaaacataatcaaaagggggaggaagtcacaagagatgacttggaagggaggatcggtatcttcactgcacctactattttcaaaattaaattcaaactttgctttcctccaacactaacaaagtgacacaaatatgagtaaattgtttgaaaggcactgacaagtgactttatttacaaaatatgcatacatacatacacacctctcaaaacaaactcctttaccaatagctatggcaagttcacaacaggggcttctaaccaattacaaaagttattctcttataggtcaaattgagaccaatacaaaattaataagcttacttttgagttaaaaaacactgatagaaaaagataaaaaatatgaattacataaatattgtttcaatggagttctagattgtacactgactctacctaactggcacaaagaaacacactggaagagtcacagagcgttttcagaatgagtaagggctgggaaccagacttcaaggagttaagtagtaggaagtaaaactacccccacctcagaacagagaggtgagtcatcatcaccatcttatccttctatcacttccttgagaccctaggtcctgagataaaatgcctaattgactttacttcggttccttactggctgcttgcctataggcaggcagaaagagagaggacccacccaactggcttctggaattagctttttcccatcagcaatatactaagaaagagaattccccaatacagaaggaccctaatgaaatgtaagactgagacaagtttgtcttggatccacgaacatccttagaagtctttccatgtaaactgaaaaagaaaaaaaaaaaaaaaagcctctctcatttctgttcaaataaatgactgcatccaatattaatcatcaaatgaaataatcaacaaatcattagtggaccagactatactttacatcttcgctcaacaaaacaagcaccaatttagaacatcctgcattccaccttcacagtatgacaattccctccttctctacctcccttgaaccatgaggtataccacaagaagttccactagccgagtacagtagtcctccaccccctaccttatccttgggggttacaagaccctcagtggataactgaaaccacagatagtactgaatccaacataatatacactacttttttttttccgatctgttaagatggattctaagtgattaaaggacagggaacatgtaccagccatggataatgtggacaaagggatgattcacatcctgggcaggaaggtgcaaaatttaatcacgatactctgaatggtgagcaactcaaaacttatggattgtttatttctgggattttccatttaatattttaacactatggttgaccaccagttaactaaactgcagaaagcgaaactgttgataatgggaggactacggtatttcatggcacaggctctcttcaacagatagtcaccacttgaaatcaagaacttaacactggctgatattctccagcacacccaaagctcagacaaagactactgaacaactggttaagcttgagtcatctttaatcaagacaagaccttacagctccagaggtagaagaccttcctcatctcaatcagaggcttttggaaactccctacaaacatgagtgcaaagtaggcagtggggataagtctacacaaagcttgcattaagacttacccatgaagtattcacctttttcattattttaaactcttacaacccaggggaggctttctgttaagccccaacacaggaaattgcttttcagttgtcaatagccaacgtctgaaaataaatccagtcactaagtgtggaatgatgtacttgcagccaacatgcatttggctgatgccaacagagaaggcaggaggccaagatataagacctaaatttttttttttaaaaaaaggactgttctactcagtaacagaatctgaaataatgcaaaggcagaaataggccacaaaccacctgcctctctagcttcaacatacatcagcatctgtctcccaaggttgcttcagaaagatatttaagttttctctaactacaataattgttccagtggtctaaaaaaaagaaatggctctgtcctgtgggtttctggttgggtggttgactgttatattgatggggggcttccttgaggggtagggggaaagagtactagggaagggggagaaaaaaatggaagaactaaaactacagaagagaatttctaactcgtcgctctttgactctgattgaggaatggctttctgccaagatttccttcaagtgctcagcagagaatgaagtgaggtaacgagaagtagtctggggatgttacacactgtgtcctgtgtcccaagaccccacacggatgtttgtccctggatgctctgactctctgggagaaaagagtagaaaagtatgaaggcagagaagacttccagggagcaaaactacttgggttcttctttctgacccactgtacatacaccaactgcctcttcctccaggtaacttgccaagatggggagtgataagagattgaaggcaattttcaaaagaataaaacaagcttgaaaccaggcagaacaactgcaaagggggtaagatgaagtccctgcaagtagtcagcaatctggcaaaatattgcacaaattcagtattttaattggacgtttcttttacggggaatgtggcatgaactaaatttgaagccaggctacttatttcagggggaggggttggtccctaaagccacttggagaggaagagaaataaaacatacagaagagtctacagcccaaggggaaaaaaactagtatctcctgaaaacaattatcataatttactttcaaaatactttggtatatcaaatgttgtatgatttcatttatatggggtaccgagaataggcaaattcatagagacacagaaaatataatggttaccaaaggctgggagcaaaggaggtgggtgaggagttactgtttgatggttacagagtttctatctgggatgatgacaaggtactggaaatggataagggtgacggctgcataatactgtgaatgtgcttaatgtcactgaactgtaaacttgaaaaggttcaaatgataaattttatgttatattttgccacaataaaaacatttctttttaaagtttagaattaatctgatgacacgtgtgcaccagccatttaagctttaattctgggtggtcatctaacatactatcattaatgcacaatccaggattagttaactagtataatacaagtaggctaaaattcaagtgactagtgtaagcctacatactatccatacctaaatcaacaaccaattctctgctgattcacctaatggatgtcaaaatagggttttgttctgtaagccagttatttgttaattagcataacgagtgttagaaatggagtcttaccggtaaaattaaaggagttcaagatacgcagatgggctaaattagtttagagacacttcccaccttcgtataaacagggcacaaaatccaaggtggcataatccaaggtggttatatctttatggagagaacccctaaatgttaaatggtcctgggtttcagtctttgtttaaagggatttctttttgcatgatgcaaagtgagggtgcagaacgtgacttttgggatattgttagcctccggtgaacatttcatttaaagtgtgttcaaagcacttaaaaaagaagagagaagtgggactttaccaagctttcagaaaaggcttctccatcaatttggtcctgcttgctagatagaggtttctatgtgtggtgggatctggcctgagaccttctttcattataatctatagagcaactaacgctcacccttcctcctttggtgcctactaacaactacgcaaaattacctaagagctgttattcactatactaacaggtccatttaataaacccagtctcaaggagtcactggtcatgaacacagtggcctccaagggtactgtcttaaaaaaggaaaaaaaaaaaaaagactctttaaaagtcggttgtccaactataaaggctaggaaagaatattagacatcctccttactttgatggctatatccaaatatattgttttctataagcattcagagaactaaaatatcaaatagagtaagaaactaaccccagaagattccatattctacttttaagtagcacatcaggactagctttgtatgttctagagctggggatataatggaatgttatcacgcctttttgcaaaggctcccaatttccagcacttaaaaaaatacacatattgatataaaacacagtaacaaatcggtattaacaattctgtattttaatcctattccaatatgtataaaagggcttacccccataaaaaaaggacaacaaataataaagaatataaaggtctaaaaacaaacctggtataacattgttagattttaagatattagatcccaaatcattctacttgagaaggtagtacactgtctgcaccatataatggcaaaatcacttggcaccatgtttaaaaagagctaacctaatactcaggttcacaaaagaaaaaaaagacaattttagaggcaggatttgggaagtcatttaggagagcccttgtctacatgagaagatgtcaattgatttgatacaccatcagtctctcatttatattcaaaatgtttagatacatttaaagtagaataagagcaaactacaattcatttaaatggaatgaaaaaagctcccatggcttacttagtaccagggttaggaaaaaggattcgtacgacagtacccttggaggcaactccttaagactggatttaaagcattaaaatgtgaggaaataaaactgttctctcaggctccagtgaccttaaaaacagtgcagtgattctgatttaccagtttacacacagctatgcctcccttaaactttactttaaaaggaggatttgactttctcagtattaagtccaaaggtcaaacaggttgtaaagagtcaagggccccatcagatctactctacaaggtaataaacattcaagtctatcatccctcaccaagaaatgcaaatttttgttgagctagaggatgggagttgggggtggtggatacaggacttgtacgccatacacattttccctacaaaatcaaagcagtatgtacaaaacagagttccaacaaaaagtacaatgatgagaaaagaactcattaagagctaaaaataaactctaattcacaatatgcataaggatttaacaaaaaaggaaaacaagatgtaaaattgcatctgctaagttaaccataccctcatggaaactgccccctcccccatacacacaaactgaaatctgtaaagtctgtgatgactgaatgaagaaatgctttagatgttttcaatgaatatttcaatggaaaagaaaacaaagggatagtaatttttttcctcagccttctgatctgctaacactgcaggaatattaggtttttgaacatcccaaaacacaggtctctgtatatctagacttgaacatcatctttgataaaatgagactatttagtatagtatttacgttttatattaaacggatactcatcttaaggaagatgatgtcaataaaagtaaaaataagccgcagttggtttttatctaaccaacacttcatggctcaatttaacaacttgctgaccttcgaaagcccagtaatagctcactggaaagctcacttgagagcaccttcatattttaagtcaagctaattcattctgaaacattcacacaataccacatagagcaataattccacactccggtgctctagttcataaaggctggtgtaatatcattaatcatcattctgggctcccaagtcctgcctcgcactttctattcttactttgttccacccctggaaaatcaattatgttggtcaaatcacctagaaagcaaaggatggaggatgagctttgcattcttcccacatcatgacaaactccaagaaatctaggacaacagatctacttcaagatgtttttcaaaaactactttttacctatggggggaaaaacaaaagtctgcaactgtcacgtaactgaatgggtattaactggtaagaagaggacaggaaagagagacagtacccctgtgtgctaggtactttatgaaagaaactgacgttcagagtcaaaaagcacacacaggacacaacacaaattgagtggctaggctggaattggaacccaagtgtaacaatgttctaagctaaaagctctaagattagtgtccagtaggccacctccctagcaggaggaagcaaaggtattttgattcaaacttaatcccaagaacttgatcccaaactaagtaacaaacctagtgtacacaggggtttagtaaatcctactaccacttaagaaacttttttttgttttttttttttgagatagagtctccctctgtcatccaggctggagtgcagtggctcactgcaacctccgcctcccgggttgaagcgattctcctgtctcagcctcctgaagagctgggattacaggcacccagcaccaagtctagctaatttttgtatttttagtagagacggggtttcaccatgttggccaggctggccttgatctcctgatgtcagatgatctgcccaccttggcctcccaaagtgctggaattacaggcatgagccaccatacccagccaaggaactcttataaacacagcttaaatacttctgtcttgcttttttcccccttaaaggaggcataaggtaaatctttgttctaatttagaacaatacagaatgatcacccctcgattacataaagatgatatatggtgtcagaaattactgagtggagtctgaaaagatggttttaactgcgaatctgtttcttcacaacacttagagcagcaaatgctactctgtgatttacagcccctcaaaaaatatttgattacatttcccaacaccaataaaaggggcatccaagggttttgaaatattgacaatctaaaactttaaagagccaaaacaaataccttaaggactaaaacatgctaattaagccactgtatagacctgacaaatcgaatgacactcaaataaaatgccagaaaatatctgttaaagttgaccttttgagctggaaaagcacactctgagggtttccacagctctcaacgttcagtagcagcagtgtactcagctgaaagtcaattaacttagaacaagctcaaaagaagttggcaaattttgaagcacagttttagctccaataatcaactattctgttcaggaatatttgaaaggaaatgttccaacaggtacagaataaaagtgcttcggtctattctgaatttaaacaaagttaaaaaaaaaataaaaggctggtggccaaagctgtgtcatagttaaggtagtgaaatagaatgaaaactgtcaaaaacaggttgattttgtactacatcataaaaatggggggtataaatcattttcataccaaagaaacagaattttaaaattctataaactacaaaaaaaagaagcaacaagttcatatcacaatttaactgttttttatcttctaactgaactatttccattttagttcaccatcttcctcatcgacattttccatcattcctacgacaagcgcttaaattgagaatggtgtctcttctataccaccaatctcctgatgcaaagtaaacaaagactaccccccagaaaaggtctggaatagcaaacagcacacgtgcactcttatgctgaattataaaggggcaaatgttacaagagaatttcaactgtaattttattttctatgaatttgaatatgtttacaaagtttgtgttttctatcaaaccagcaaagcaacaaagagaaaggttactgaagactattcctaatctactggtaaggcaaatacggctattctaaaagttcctctgataagggctaggaaagcacaaaatcaaaactcctaaacctcatttacaccataggttcaactttattttcccagtaaacactctaagacagctgttggaaaactgtataactgtctcgtgggagtgacacatatttttttttacattttattctaacggaacaaaataccaagtaacacaaatatcaatatcaggaaatcagagaaacaaatctggatgattaatgaattactagagaagaatattgtttcatacttttctgtatcctcaaatagatgtttcttcatcctagcaactagccattaaaggcttcattaccacaggttatctaaagaagcagctctttgatttatgaagagatgttaactgggaattaacttactgaatggtgaaaaggtccagatttgccaccccaaaatattccactttggcattaagttttttttttttattatttttttgtgaaatggagtcttgctctgtcacacaggctgaaatgcaagtgcggtggcacgatctcagttcactgcaacctctgcctcctgggttcaagcaattctcccacctcagccttgtgagtacctgggactacaggcgtgcagcaccaccacacctggctaatttttctattttcagtacaatcagggtttcaccatgttggccatggttggtcttgaattcctgacctccggtgattcgcctgcattggccttccaaagtgctgagaatacaggcatgaatcactgcgcctggctggcatcaagtattattttaggctgaggaaaataagaagtcaacagatgcaagatgagttctctgccctccccttttctccctaaaagcagagtataaatttcccatgggaagatgtctctctgtcctgtaccagttcagaagtaagcgactcattacttgagacagtcaacatcagattgtttatgcatacagttctgtataaaccaaccttgttaaaagtgcccttatcttgtcattacttacccctacatattttctgaacgcttccccatgatttcctattccgcaaagtccaaacctttcctttgttaaaatggtatataagccccccaaccctgaccactttagttttataatacttttctgtcaactcccaaacacaaaatacgagcaaaaattgtgtgccatttctccaattaatttccaagtccccaggtactaaacaaaagaggacagaagttgtttttcctaacaatgataaagaactgtactgtatttgatttcttaaaatgttacaaatttctagtttcatcatcctgtaatctttccactaaactaatcaaggctgacactgaaaattgttctataaaaatacccaggttcaagtaaaaagtgaacctagaagaataaatgttaaagactttctccaaaattttatatgaagcttctacagtgataacaccaaattttttaaatgactgcaagacctttggcaaagaaacaagatataatgaaaaaataattaagtttaaagatacatcaatgaagatataaataaagtttctccattaccttttgcctatgagagatgttccaaaaatagaggttccacaaacttgacacaaatttcattttatacaaacttgggcactaaaatctaaaaatagattcaaatgtactgtattccacagttaacgcactgcggaccaaagcatttacccctgtgcaggcatctcctttcctacagacctaagaacacacacaacctttctgccatctttctaattaaatagcatacagagtttgcaaagtgaggtgtttattaagttaccacccacccaaccaccctgctgtttccaactactggtctgcaagaatcagaattcttgatctcttgatactatggacatttcacatgctcactgtacaactgtaactgacatacaaaatcacattttcaaattaatgttcatcaaaacagctttgtgttcactgtgattgactcataggaaataagtgctattaaatttgaaggttcccattagtctaataaaataccacttatctgtttcaatcctgaggagctaagattgtatttgtttaaaaagaagagaatcctatgccattaaaatagtttggaaatcacattattttgatagaataaagaaggatcaaaactagctgtaaaattctcagcaagcagagacacaagataaacctagctaagaacactcatattaataaaaaatattttaagatactagccctaaggcgtgctggggcatggcaggagccttatcatgcaaggcactacctactcagaggtaatcaacatctctttgggccctctggaatttatatttgggtttttgttttttccccttttgtcaaagtttctagttagcagctgatgaggtcagtacaagacctacctcaaacaactgagagtaatggtgaaatactcattacctgaggtcttccaccaactactcctctagccattcttttagaagaaaggaaaaataacagtgaaagaacaatctaccctggagtttcaaaaacctaattacacttaaacacacacacacacacatgctcgcacacgtgctttcagcaacatatcagatcagtaaggacacagcctagtgacgtaaactcaacatgtctagttctgaaagctaggaattaactcagagaccaatgctgaagaggggacagcactttaaacttaaactttccaaagaattaagtactgcaattgttaacacctcttccataacgccctaaatctagaattcaggtaaacctggaaatccctggttcaatctccctacaaaatgtttaagacattgataactcctagctaacgagtaccttccaggtccccactacagattctgattcagtaggcctggacagagcccaggaccgtgcatttctagcactcattacaagtgattccaatgcgggaatcctgtgaccatacttcatgagacacagtctgattcccaaaacttttttgggcttcaagatcacctgggaagctctctgacaacagattccaaaactcccttaggtgagtaggtgaggatgtagagccaaatttgggtaccaccgggctagaatatcaagttcacaaccatagattataatgtttctagagaagcacagatgttcttgttcatttggtgtattcgtcagtccttactgtcaaaaaccttccattctccttccagagaagacacactcgccagaagatgccctctggataactctgtaaaaatcacacatctctctataaattcatcagttggccatttgcttcatctttaaagagtgagctcttgcctccaacaagtggcaaagaggaaacatccaggtaaagcataagataatcagaattctggtccctactctaccgcttaatagctctgtggccttgaactagtcatttcacaaacctgggcctctcatcacctatgatgtttggggcaaagaagggagagggttggttaaggtcacctctagggcttttctgactgtaacactttattactcattccttgcatcataaaatccatttcgttcatctagaatgcagcatcagcaggtgtcaaggactcccaagtgcatttaaaaacgcaaagggatggactaaagtcagctaagctgtacaagcagcagaagcttctcatgatgaatgcctatagataggaaacaggctgaagcatacagctgggcagaagcccaaagagacggacctgacaaataacataataaatagaacttagtctagagagaagattattgtatttgctactgaagacatttcttaatgtacttccctaatcctcactcgatcaaaatagtgacattaatttgctaacactgacacagtctaaaagttatacactctcttcaaggacttaagaagcacacactttcctaactagatatttttgttccttagatatagtttcctgattcagcattaagaaagatttaagaaaagggaaaaggaaagatttcaaatcttcctgtagagtgactccagagttttcctgtaacccaattaacgcacatgctcctacaaaatcggaatacagaaatgggtcccaactgcttcccaggaggtagaataagctggataattagagaaggaccaaagaactctggtctgtccctaaaatacgtactgagaaactgcacaagacgggtaatgctacacaccacaggacagggtccaaagctccacaaattctttcaaaaccttgctagagatacattagtactacctcttacgaagtatgcctacttttcaaagtacaaccactcagaacccagatttagatactaccattttctagactattttactcaatagaagtattcagtaagaaactcagaaaaaaaaatatcctaaagcagtttatgcttaagttaaatgagtgagatccttctaaaagccattttaacccatattacaaatatgtcagtggtccaaatcaaaccaagattaccagaagttgagatgcctagtgttcagatttacctactccacttttgaatttattatcatatatgtttcttttaggaatcatgctcatatgttattgatgtgaacaggttaaactggtctgataaccagttaacaacaaatgatttcaaaagcttttatagcaccatgttcagtgtaatctactgtcagggagagatactcactcttcccacagtccccaaataggctctatgatcaaataaggccggggaactataattcaaacaggttttctttactgctggatttttcatagttcttaatacagtgattatcgagtatggatcttaaataaagaactacagagtgcagcacttcctaaacttgtctgtcaatataatacttatgttaagaaataattactagtatctcaccaaatgaaggttgaaaaacatctttcaatcttatacacactatcgtgggaaggcaaattaatacaccaaatacactatgaaaaatggtatgaaagttcctcaaaaaattaaaaacagaactaccgtatgatccagcatccccactactgcatgttaacccaaaagaaatgaaatcaatttgtcaaaagggatgcacgcatatccatatttattgcagcaatgtttacaacagccaaaatatggactcaacccaaatgtccatcaaccaataaatggataaagaaaatatgctatatatacaaaatgaaataccattcagccacaaaaaagaatgaaattctgtcatttccagaaacatgggtcaacttagaggacactatgttaagtgaggtgagacagccaaataccacacgatctcataggtagaatcgaaaaatgctgatctcattggaggcgagagcagaatagtgggtaccagagggtggagaagagaggaggaaggaaggagggggccagatggttaatgagtacagggtcactgttaaaagaaataagttctggtgtgctattccacagaagggtgactatggttagcaatattgtatagtatacttccaaatagctagaagagaggattttgaacactctcaaagaaattatgaatgtttgagatttggaaatgctataataccctgcttgatcattacacaatgtatatagcatcaaaacatctcactgtactccacaaatttgttcaattatgtgttaactatatacaaatatatactatatatagtagtgtacacgtaatatatatgtgtatacatcatatatagtattatatatatatatatatatatatatatatatatataatgtatagaaacgtcttacatctttagaaacatctttcaatactcatgaccattgtggaatttcttggggactctacttgcttaccaaatatttttaatagaaattttaccacagtggaaatctccattacatccttcccctcaagccactgaaaagacaacaggcaggggtcagaggtgaaggaaatggatgagaaatatttacacagttttttagtatctaggtatgtattaaagaatacccatgtgttgtgcttctattaccaccgtctaccacactaaagttagagaggcaaaggaggtgaagataaagaactcaaatttatcccattttgccacataacagctctaaagattcacaaaagagtaagattaattcaagattgactagaggtgagacgtgaggatctgtaagatgtctcctgtggcagatgcctaatatgaaagatgtatgatttgtctaatattttcatcttataaaatgataaaatgtatcatttcgtaacagtttcataacaaaacatgacttttgtgctctgttcatgcatctttctttttaatagtaaggggagctctactaagcaatcagaaattgcatcatttgtgtcatagccctcaagtcatttatcatatttttatcttttatattaaaaaggttgcaaaatccacatgtcaggggtgttgttttactttaaaaacaaaagataacatgtttaaaacatgttaaaaagatgtttaaaaacatcacgacagagacgtaagagcagccttttgttcttcacctttttcaacttattaaaaacactataaatttcacatatgcttatcacactcattttggaaaagaaattgaaaaatctcatccatctgattatcagtgttcagaaacataagaaccaccttcctaatatcatagtgaacatttaagcaacataattaaaatataatggccgtttgctatggatcaatgacaatcagtttgtacttagctttttaacttgatttcagtaagttgtctctgtgaatctcaatctgtagcttgaggaaatatgattatgagccaagtccaggggctggctctagaactcacttgcagatcttggagagaatgagccctaacgattaacggaatagctcaaagtcccatgtatgaaaaagtcaaaagtgaacttagaaatggcccagtgttaccccctttttctctgccttttaccttattttgccaatggaaaccagaagtctagggctgacttatccaatgtcacatgactaggtgagagttcagactcctggtctcattcttcacactgcctttaagtatcttttactcatttcaaatattccattttatatttttggttataagctttgtaaagcaatttggtatacactatcaatcaaatttaattaacatgaaaagtccacagagtctgtctaccttcgtatatttttagtgtttaacttcatatgtatgtctaacttcatgtatttttagtgtttgaaaacaactcctgcaggaagcattaacccttctatcccaagaacgtgctctttaaattaggttttggtttactctaaaaatttagtcaaatcttaaaaaatactaaggagattttcacctaatattcaaaatgtactataattaaggctttatctttataacaagaaggacaatcatataccatgtcctttccttgttaaggaacggaacataagatctcatcacgcttggtattatatcagtgaaaatgtttatacactgacaatgtgaacattaccatttattttatcatatataagcaaaatgattatattaacataaggaaaacacattttaagattttttcccctctcccaaacacatattgtatctcactgttgaaatgctaacttaaatacactcagggtactaaaagataaaagttaacatgacactggctatcccagatacatatacttttagaagattttccaaagatcctgtccagatcagagtacattaaagtccagttaaaatatatactgcccccaaaatagtttatgatttaaaaagaaaattttaaactaagtttcatattgctgatgtaataacagagagaaaatctagatatgtaaaattgcagcagtgaattatttacaagcagtaatcttattattttctcctatcttgagacacgatccgttaaatataaatcatctacataaaactgcttacctgttattttgtctcttacaagcttacaggactctatttcaccaatgctcccaaagagactctttagttcctcctgtgtcatgttctgaggaaggtagttgactattaagttggtcttgctgtcttctgtgttcccagagtcaactggtgacgaacagttgttgtttatggtggttggaccattggctgtgttattgcaagttggcccattagacagttgtgtttccatggcagcaattacctgctaaaaacagagaaaacaagaaatgtcagaattcatatttcacaacctattagagactccatccaagaatttaaacacttgtcactaaacacaagtcgttctaatgaaattacaacaatgcttcaacaaaaagtgtaatacctacactaattttcacttcatattaacctattcatcttaaggttacaactatattttcacatacatattccatacatgcatataagcacaatttaaatcttaaacattttctagaatcacattctgggtctattcacatatccttactcacctgcagtgtccacagatgagaaaatcaagtaccaaagggcacagaattgaaccctaactaaaaatcatactagaaaataaaagtgcttaacatgctacaaaaatgaacaaaaaaatgacctacctaactctgaagagattttcagttatcctaagaggttcaatattctaaaactgacagatagccattaacttaaaaatcaaagagcaagagtacttttaaaaatataaatttgtcaacatgtactgttttggttacatattgaaaacgtttttgatggacaatatcttatctctaccattggtaagaaaaaaacagatgctatattttagggagtggaaaggaactaactgtaaggtaacttgggaatgagctatgaatactttgtctaactggtagaatctaataggacactcctgtcaaccttggcagctaaaaattaccaacaaggtgactgatctacaacatcaaaataaaatccccaaacacttcgatatggtgtttctccttgactctgctttttaatgagaaaaaagaaaacctatccagtcaatgaaaacaacaatgtaaatatatcaacttttgcaaacagaccagcccaaggaattctcgtctgagcacataagcctgttgaaaatgcaagtaatagggtatctataaactccaaacaccagataaagaacagaattggggaaaatggcctcaaactgttcaggctactctacaaatcacttattaagcagtattaaatctagtttcctaaaaccaatcctatgcaaaagagtcacaaaccacagccccaaattttccaaaatcattttccactaactacctatctttggacagccaagactgtggtggaatctaaaaatcaacgcatcactgaaaggattatccttcatattgcatacatctctcacctccacaaagaactgcttctcaaaactgacaattctgaattgacgggatgctagttttagggaagctttaacatagaaaaggcaaagaacttgaggcaaagaaaaaaagcaaagtaaagggaaagagggttacaaggaaagagaaaaaactgtcttttaaaacacatattgcctaagaaaaataaaagggcacattagcagataaacatataggaagaaatctctactgccaggagatgtttacaaaagaaggcagtgttggacatattgagactggtcagactgaacaagaatcagtgctgtcatgataaaaaaacatgaggcaaaatccagaatagcttttgaaatatccaacaacctgtaacccctctgtgacttcatttccttgtcaaagaagtgggaatttattctacaagctgcaagctgtttctctacgtaagctaagttttctcagggaatacttaaagggatgaaggaaaataaacctttggaaatctgtatttaaaaatcttaaataattcaagatatgggttttattataattagcaaatctatttgaatttgaaaagggaagtttcagatttcctaattaaacataactgttctggtttgtagaatattagctgtgggtcactcttttcacagcaaaaattcttctggggttaacccttgcccagcagttatggaaacaatgagctacaagattaaagtggccaaagacacttaaatcactactgaaaagtttggatgggtgtagaaactacaagagacccgaatgggagattcggactaaagctcattgggatagcatttgaaatacaaagtgttcattgactgaaatcagcaagatttagaaaggacaacaaacactcctcacttaattgcacatttatttccatgttcaggtggcaagaatgagctcctaagccaacattcaagtgaacagctgcagtaggctgtgtgcgctgaaaattacagcatctctctgctataggaccatctgctcagaataaaatgatactaatgtgctatattttacaaataatgcatattccattgataggctcaacacaactgttcacagaatgcaaactctttcaacagttactgggcaaataattttcagccagatttacaatttcaactttttttttggagcataaagaattgtaaataacttcaaaatttagtaaccaaaaaaatacatagtaaacagaatgtatagaattacggtaacttagtattcagaccataccaaaactttttttgtttttttaaaaaagcttgtcactcttttgagtctgcgctaaatcctaatttagattgtaaaaaaattacatacgagagcatggttctgatgctacatacaccactacagttaaaattgcaatgtgctttaagtcctaatgatggccataccacaataggttaaatgtaagaataattagtatgccaaatgaaagattcaagtgtttggtatggcctcagcactcctccaacatgctaaaaaaaagtagcctacagaatttaagaaaaatcccacagaccccggtccaaggctctgctgcccacgaaccacttctaagcagagaagccacatcacacagtctgactgccatgttagtttggagttgccgtctgcaatatggacacaaaaagtaccgtatgttagatgagcaagataatgcaacaaatcagtttgtacaaaatttacagtgattgtattgatattcccagcacgtccatgcagtgtggcttaattgaaattgaggcaattccaatctaatctttccaaattcatttcaacatgtagttttcttgcacaaatataagcatttttaattaagagcctgattttaaaacagtattaactagttatcttggcatctattctgaagaactaatgtaaaccacacctcaaaaatttaaaaaataaagtaaaataaagcaaaatactgcaggctgtcttatctcttaaggatgtgggagaagggaggaaatgtgaatgaaattttatagtgggaaaaagtcatcatgcaattcctaagtgattggtttgcataaaagcactctttccccaaaatatcagaaagacattaagagaagctatatttgcccacactgttacattatactataaatgatccttaatcctgggacttaaaattaaaagtgaatcgaaaccctgtgaggttattttgccactacagtcaaacggtttctaacagtttcaatgagaattgctcacatatactaagaggcagtaaaccagcatctttcaattgaaataattggaccgataaataggattgtttggagtaatgctcgcataggatgtcagctttgtccctgaacgaaatcaagtgaacattttttaatatgtaaattgtaaacccagcacgatttgaaattagtgctgctatgaggcctccaatatagttaatgggccatttaccacttattgaaacttgcccaaataccaaacagagccatgatattggcacaaaagccaaagtttactttttttgccatatatgcagatgcttcaaatggtcaatataatcagaaaacttagtttctaaaaatagacagtgaataacagaagaggtccaaaaatgtcttttacttattgataattataaaaattttatcctgagaggcaatcctggctgtgatttactcttgatattagcaatgccgccagtaacgatggattccactttctggcatctatcaaaaaggattaacatacttttttacaggaagccatgaaaatattttactcttcttccgttctcccactgtaacaagagattttggtctgaccctatgttatttttcaaaaaactacttatagtttaactgaacctgtgaaaaagtgctttacacccatgaaagatttttcataagaacccaactgtagttaagactacatgagcaggaccacacccagcagggtaaagcaggcataaatgtatgtcctgaataccttcaggagttcaatctaaacattgctcactacataaaacagattttaatttaactgcctcagtcccttctatttcataggaggtggacactaatgagctaatctattgacacccctctttctgaaagccccagggaggtgaacaatcactttattgcaccaactagataggaaggctgtgtatggaaaatgattctactgcacttttacatttcaagcaccccagacagtcttctccgcttgaggcagacacatacctttatgggaagttataaataagttgctcacatggcccttacctttatgctggccaacaattcagttactaaaaatgtaaagctacttccccttcacttaaggacaggcaattctgctctactcaatctaccacagacaactgggctgtgtactatttatagattccactggctctgaaactcttcggaaagaaaaaaaaggccatattccagtgaaacagagccattaattttaaggcttaaaaaaataatgtttcaatatatattctcctcttaatttagacatcacttgtgccaattcagactgcttttcctcctgttattatccaagtaataatttacgaaaaggcactttagcatagatgaatctagaatattctaaactttcactgggctccaaggtaaaatggctgttactatggtgaaagcgtaggttttattgggaaatagaagattgtctctacttttatacacacaggtacttccaaaaagccataaagacttctaaactttttatttaaataatcctttatgaattttaacatctactgttttcacaatagtggaatttagaaaataaatgctttatatctcatatctgggaagagttaagaatttgagaagtcaaactgatccaatagtttcctggtcacatgagagaaaagcagtctatattttctaatcttacaattaaaaaattctgcaaactaaggtaatcagcttcttcactattttcaaacctcttgcagacagccactaaaccaggtagttaatcaaaagcatcttaaataggccagactcggcggctcacgtctgtaatcccagcactttgggaggctgaggtaggtggaccacttgaggtcagaagttcaagaccagcctgggcaacatggtgaaaccccacctctactaaaaatacaaaatattagctgggcgtggtctgtagtcccagctactcaggacgctgaggcaggagaatggcttgaacccaggagggggaggttgcagtcagcagagatcacaccacttcactccatcctgggtgacagtgagagactctgtctccaaaataagtaaataaatatatcctaactatattctgagagttgttattaagttcactcagtataatgttgcgaggagggaaaaaggttccatagcctagaaaccacctgatttagggaccagacttctgcgggttaaagtcatagcagggctgctgaaagggccaatacaatgacccctggtgaggctgcgcctgttgctccagccactccattgccatggtcaacatcctgacctgggctctcatcttcttcaggaccagcaaattaaagcctccaaaaggtccctctctcctcatcctaatctaccttaacaatgttcccaggtagactttctaaaccctcccacagctccctgctgcctatcaaatgaagtgtaaactactaggtatcaacagaaatcctgtacaactacttttatcagcccacttattcaagcaccttaagatctgaactactccttgtccctcaaacagtccagtaccttcactcttctagctttgtttatgcagtcccatctcccttattcaaggctccatccaaacccaccccatctccatttcaggggtttgtacaaactaagcattgaaaaagcaaagggcaagaacagtttcttaaaaattggagactgaaagagcaaatccctccctaaatgtgtacaaactaggtaacttttttttttttttttactttttacaaatacatttaaactataaattggaaacacaaataatcatgagtggctctaacttgtttttctatcccaccaagtatttcaaaccagaagtaattatgaaagcatattttcaagttttgacgcactccatcagccaccctcacccactgaaatctaaattcctattatatggtaaaaggaaaccatctacctttgtgaaaagttgtgtatttttatttcaacaatctatcacactaactacaaaaccctggaagacaagacaaatccaagcctctggccagcagggttatggatatgggcatgtggaatttgggtccaacttcaggaaaatggcaaaatcaaaggtaaatgcaggaaaattaaacagatcttgaagaaggcatttagaagcacatcatgattaagtcgtggatcaccagtgatcttcatactaactagaaaagtttaggcaaacagaaacgataacatctcttaaaagaatcatggctagaggcaaagacaagcttatctctcaggctggaaaggtccagcctaaacagagtgaacttggtctctacacttatttgcaactagaagctttgaataccctgagtattcaaacacagcacaccaggacagaatcagcccagtacaaaggccttccttctgaccacatcaaacctctccctaaatgccaagttacagatgaacagaagacatttgtctctaaagttttagagccaaacatacaaaacacaaacaaacaaacaaaaaacaaaaccaggcatcacaacctttaccacaccatcctttggggaacttgcagcagggacaaaagcactccaaaattggtgaaataagtcatatgagcttatagatgacagctgggtaggcagtcaaagggatcatctgcccgacacacaccattcctatagcaaatgctttatctttcccattcaaatcactaagtggtattttcaggatatgtttgtggtttcacttaattaagcaagagaatagtcaaccaagtgctaaaatcacaaggctaacaatgtcagttacaggaacaagccattagtttgttttctttaactctctttgctttgtgattcctaaaataaaggtttgtagctttaaatgtcaaaggatttattcaatctagaatccttgtcaattctccagcccacccacataccatgttagctgtctcactagctctacgaattcctcaaacccacattttcagccttggggctaacaacggcccaagaacttgcagagacaatgcactgaacagctgcacgcgtcataaggagaatgttctttggcagcaaacactaacgtttttctgtctcttggccctttatgacttctacggacaaagtacacagtctccttcatgccagtctttctgaggttttgtagtttcagagctggcaggttcaaaagctttgaggttagagaggtaagataatgagtttagggtcccaagtccttctcttcagtctaagtccattacaggtatccagtttgagcaatgggaaagtaaagatctggcgaaaaagatctgcttaagtttcatgttttgttcattcatccattcaacgaacatctccatgcagctcccacgaattcaggagagtcctgaggtacagcaatgaagaagcatcttggagtgctgatttgctgtggatggtgtgtgcagaacatatacaagtatgaacacatagaagaaaacagtacatcagcaataagtaagagtgctgtggaatacatatagagaagaataaggggggttgaaaatgtggagatgaagacgggtagtttccagcattaaacaagcaggcctcaatgaaaaggtgagctttgaaccaaggtttgaaggagatatgggctggctgctgtgataggaagaaaaatccccttcccctcaatgtctacatcctactcccagaagtgtgaatatgttatgttacatgacaagggggaattaagattgtagaattaaagctgctaatcagctcaccttgagaaagggagattatccttggttactgaggtgggcctaaggtaattacaaggttccttataagtgaaagaggaaggtgagactgtcagggtgatgaagcatgagaagaaatcgaaaggacattgctggctttaaatggggccaccagccaaggaatataagcagcctctaggagctgcaaaaggcaaggaaacaatctctcataaagactctgggaggaatgcagccctgccaacactttaatcttagcccactgagaaccactttggacttctgatgttcttcggaattttaagacaataaatcttgtattgttttaagccagtaaatttaaagtaatttgttagaggtctaacaggaagtaaagacagcccccatggagatatctagaagaaaagattctaggcagagacctgccagtgcaaagcttgtctgctgtgcagaatgacaaggagataacagggagagtaggaggagatgagtctaagaggtaatgaggccggaacacatagggccttgaaggccaccataacaaaaaaggaaactataaaaggttttcagcaaaagagtagcatgtggctactgtgaaaataaattgtgtgtgggtgtgcaggaagactcagtgagtttggaaacagaccagtcaagaagcaactgcagcaattcaggtgcaggatgacagtgactcccaccagggtgaagttggggagaagtcatcagattctggatatacccagaagaaaacacattattaaggtgctacattttaattacatcagtacactgttgaaatccattgtcaaaaaactggtttagatactaactgctcacattcctacaaaccaccaaaacatttactatgctctggacactaagaacacaagatgaataagcaaaggaagagattttatggacagttgtgccttaaaagaaaataaggatatatatataaatctatatatagatatatataggaaacccaacatacaaaaattttgactttataaatattaaatccagagttattcactttatggttggatattcactattcactttatatttgctactaaatgaatccactgccagcttcttaaagaatcaactgattcatttaggagcaaatataaaatcacaaatcagtagcttaaaacatgcaactactactaaacatagtatatcagaaaattgatttgtaatctatgtgagcccccttaaaactttcagaattcaaagtaaaatagctcaaagctctccccaaaagtttaaaaacaaagtggatgaagattagattaagtcacattttgtaaaatgggagtaaactttaaaatctgtatttttcaacagggtcatttatatacctctacaatagtaaaggttaagccatgagataactctgtcttggttataggctggaatacactaaatcattaccttctggtgatgaatcattccaaccccattctttcattccaacctaagtggacccaattaatttccatgccattatttggcaatagaatctaaaaagggatatgagtacaacaagaataaaatcaactactccctcagttttgtggcagaggttttgtttggtataggcagattaatctgaattgctaaattaagacagttaacatagtaatcaacacagaaattggattaacttcacattcttctacaaaagtcacagctatcaggaaccccctcagggtagtacaaattgtgaaaggctgattggaaatcctcaaattaatcccagtagttgagtgttttcattaggtaggttaaaaacatagctcctctgttggatacagacactaaaatactctgtcatgtacaaactccaaagcagaaagaatgactaatcttaaagggaaaataaaagacaaggaaggtttatggacaaaaataatgttttttaactcacaaatgttataaaggccacaacactcctcctggccagtgaggttaacattttatttttcactgttatttagcaggacttagagatagaaaaccaaatgctacactgtttaacctcaagcagcttacaccaaaaaaaaaaaaaaaaaaaaaaaggcatctaaaatgtcaaccaacaagatttatttccttagtaacattaggaggctacaaataaagggatgccatcccagggcacataaatatcttagaattcattgatgtattgtggagagcaaaacaaggagtctaaaaaccttgatcaatacagacagcttccttctgctctgaactgtggatcatctcaattactggtattcacctatgaaatgtgtttttcttttctgttgatgtgtaacgtcctgagattcccaagacatgtatacttgtgatttagagacacaactatgttttatttactatggaaatttgaggcatcttaaaaaaacaagattcacaccctaagatagtaactttatttcctttggtccacctctgcctcttgctcccccaaagacagctttctttaaaaaccgacatcccagctagaacaaaacacacctaggtacatctgtgactttttatggtaattaagttcctggttatttactacatttcaagaaaaaaaagtgggggagggggagaatttacattcaatgcaagtgttatttttattcagtgattccaaagtgaggaaagggttgctaagggcgagaagtatctcaaggaaatgtcttgttaatctgctacataagaatgtatataagagttaataatgtttttcaaaaaagttaatgctagacactatagaacaggtaaggcccttcttagcctcagaccttatccacttatatccacatcaggcacatacacccaatttcgaacaaccccctaacagagaaaggggtcaatatgcttagattgatgacctcaccatctcacccagcatagagcttcctcttactcctacttttgtcagacttcccgctttgcaagttgtcttagtatcattcaagtaaagcacatttgaaacgaacgcttaaggatctcaaaaagtaggtggggcaagtacccccatgttacagatgaaaaatgaagcaagtgtatgagcatatatgtatatgtataacctgtatatacattatacacacatattcccaagtgttgatgagaaacatctatcccccacaggctgaagaggagaagggagcacatacgcaattacaggctacattttaacaggaaattattcttaagactcaaatcacaaaagcattagcctttgaattatttccactctaggaaggaaaagagcaggtaaaggggtctgttctctttaaaagctttaattacatatacatattttgtctgataatgtcaaagcactttacaaactctaaggtgccaagtgaacagagggtattatcattattgctggacaaaacaagatgtctcttaaaatgttagcatagaaaatttgcttatctgggcctggcgcagtggctcacacttctaatccctgcactttgggaggccgaggcgggcagatcacgaggtcaggatatcgagaccaccctggctaacacggtgaaaccccatctctattaaaaatacaaaaaattagccggacttggtggcgggcgcctgtagtcccagctacacgggaggctgaggcaggacaatggcatgaacccaggaggcagagcttgcagtgagtctagatcgcaccactgcaccccaagcctgggcaaaagtgcgagagactccatctcaaaaaaaaaaaaaaaaaaaaaaaaagaaagaaagaaagaaagaaaatttgcttatctgtcttttggattaagcctgtcagtttttcttccccccacatctaaatggacagcaaggctgcagagtcgtgttgggagccttttaacatggaaaggaaagactgtggacagaaagtacagtatgcagacttttcctaatcatgactgttaattcctgtcctggactgctgaagcagatgctatgttaaactacatttagcacagtcacaaacggtgactaaggaagttaaaaatttttacttgcaatgctgcaatttttaaccccagacctccaaagactatgtttaaatatacagagtactaacagcccaagtacttcacattagaattacagccttgcctattttaatttaccttatttttaaaagtgtgtgacccccacccccctccccaactccccataaaaatacacatctcccatcctctttgagcctgcttatgctcaggctcttggaattttaataagattagaaattgctacctccttattctggctaagaactccaaagatgatccaggcatcttgtacttatattcagatttacaatacagagaaaacaagagtgtagaaatctaatccacgattataccctagaatctagattaataatgtgtacattatgagatcacatgggatcaagtttccacaattaatggatcaggcaaatgatccatgtatctacattcatacaaaatcatacactctcctatcatctttctcctatcatgatcttcaaaaatgacctgaatttaaactgtggctttaaaatcacatttaattacaagaaaaatagaaaaggaactttccgtgggatttgagtatcttttgctacagtaaagaagttcagatgatctccctgccttctggagaatccaacgaatcctacaactaaaagtaaaaataaatggcaagggaaagaaactagcaattattgattcctctttccatgccagtctcaagctagatatttacaaacaaaatcttatttaatcctcttgtggagcgggcaaggtgactcacgcttgtaattccaacactttggaaggctggaggacaccactgcactccagcttgggtggcagagcaagaccatgtctccaaaacaaatcttatgcactataagctatattacattctcttcaatttacaaatgagaatttcaaaacttcaagagttcacacaagtattaagtgagaaactgggatttgaaatcagtgctgagaccccatctagagcttcctagctgatctctctatttccaggcttgcccctttctccaatccttcctccattccacggctgtggggatctaactaaaataatgggcagcactccactactatctcttttaaagctctgctcactccacgttgcctatgaagtaacatctcagctccctagtgaggcagctgacttgaccgagctcctacctcttcatccacatgcccagcacccccgcatcatatacacaagctctaacaagctcccagtagttcttcccactcccagtgttttccagtgtcacccaacctgttttctccacctgcaacagcctacctttcttctcctgcctcatggaaacatcctcagcaccggaagagagcagacaaacctcgaggaagccttctgtgaaccactcagttggaccagataactctgtgtgctcctatatgcctgactcacctttatctccccagtaaaaaatatcaagacagatccataaagagaatgaatgccatgaattgtgattcaaggtggcaagtaaaaaacaacccccttacttatccatgtggttttatgttccctgccaagtgggaaaaatttccattgcaaccctgtatagctggaggagcagccaaagtcatctcaggttgtttataaagaggaaggtagactgtcaaggggaaaaaggggaaagtaggctgtcaagtcctaccactaacacacacatctctttccgcatatagctactaattccatattgtaagctcaaacttcaagtggaatcagcattttttaattcctagctacaagcctttgttaaaacaatataaacctcagggaggaaccagggacaggtgtgttccattgtcaccatctcacagttcaaaataagccaatctcatcaccaatgtgtaaaatcaagaggaaacctgaagtttatactctctccccaacacagccaaggtctggtgtgtagaataccaaaaagaggagtaaagaaactccccaaggctagaaaagcaacattcctgatctactgcatgtaccaagcgctgtgctcagatgctgggaaaacaaagatgtacaaaaccccactcattccacccctcacggaacttctccaaaacacacctgtgtcctaagaaggtgtccaaagaagtcaaacgcacacaaggaaacctttaagaacccgcagccagaaataatcccttctctacctgacctatgctaaatagtttgctatcaaaaaaaaaaaaaaaaaaaaaaagatggcaaaatcactgctgctatggaaactaccacttctaacttcaatatttgagtgtggacacgtatttgagaagaaatgaggcattttgcttcccagtgtttaaagtgctaaacaacaggagactgtgcacagcattgatactgaacattaaagtggacttctgcctcactaagaaaattttaaattataaagaagagcaggctgaagttttcctgatttagaattgctcagagagttttccaggtacccatttcctgttacaacttcatcctatgtaaagtacaagtttctttaaaagaactctcagtagagtagatttaacatgtaaattgcttagcagtaaatagtctttaactgttgataaaactttcaggaagtacctactaagtaccaggcaatatagtctacagcagttaggactgcaatctctttcagatcgagctaaaaagaaattctcgctatcatccactactttaatctgagatgggtatgaacaaaaagatccttaaaccactcttctaaagggaaccatgaccctgaacccaaatttttcaattcttctgtgaagagtgtagatctactcaaatgccactctatcgctctatcttagactattttaaagagttccttgacgattctgagtgccagtctctagttgagaatcactataagggaaatagatggtttagaaacgtgccctttctatacccttctgccccacccaagcatgctttttacatccatcctttgtcaggctaaaacccaggattcacaacaaagatctggagactgcaggccttggaattgagttgagtcatcaggacactattctttattctccatttctaaagagcaaaagtgggaaacggggggtatcatgaggtagaagcaagaacggtaaattaaaactgaagaaaacttccactgcactggaacagtaattagaccaaatttgcctgccatcaattaaggaagaacaactgctctgcatcgctggctaccaagacagcagttagttctcttaagtaacttcttgctctaactggaaaatgacccatacttttacttgccaagaataaagacagctggcctcctacattacaaataaccaaaatggaaacaagtgaatcttttttatccaccaaggttgactacacattaactaagacctattctaataaacatggccaacataaacagcagcagccaggtggcctactctgaacattcttcctgatacaaagtacatcatatacctaagggcatggtgaacaaaaccccccagagtggctatgaccagcaggaagaaaacattgaggggatgggagtcaaaagtctacttaaagtattaagcattcaaataaatggcagaatccgagggccagcttgcaaaaacaaaaaataaaaagccaacaatggactctgcttaaataaatcacgtgcgaggttgaaaagaaggacaaaggaaaagtggcaagggatagacaaaaacaagcagattctgtaactctcctcaacctccaggccaaagttcggactggcagctagcgggtagatttagcctgaaaacatgttacgtggtttctccaacgtccttaaaaacaaaacaaaacacaaacaaaaacagtagtgttcaacatttaaaatttcaccaatgtaacaatttcacattcataaaactatatttctgatttcgcttaataaataaagtttggcaagagtccatattcccagagctactagccagcaggttgccctataaatggggtgccttctttccagctctcccaatacagccttaatgttccggcccctgcaagggctggattttaagtaaaagagtatcatagcctaaatgtcaaatgtgctaaagagtatatgcttttctaccatgatggagaggttcagaatgtcagagtactgggggagggagggggttttccaaggtcatctaaactgaggatctttaattgtagacctaatcatctgtgaaaatattctaatgaatatgcataacaaaaaatgaggcaaaaaagcatcaagtctgtgtcactaaacatcctaatatgactgccacagacattcaaagcactctaaataactcattttggcctgtttatactactatggatttggattagaaagtcatcctgtccacaaagaattaggtatatcctgtcccttctgggggctgagtttgagacagttaattcaaacctaatcaaatattttgctatgagaaagaagaggaggggccaatgaagtgctttatccccaggatgaggcagtgagtagggcagcacacaaaaaagataaaaatcacctggcactacaccagaagcccttgaattaacattaaatttccaggttaacgctctaaaaactgtctcatgacaaaccacaaattgtattttggaggtaaaacaggaggtaagtggggaaggaactgaagggtaaataagaggtcttacttcacactttttctgctgcttttggtttaccccagtagaatcccatgaaaacctgcttcacactggcaaagtgggcagacagaggaacaaaggcaattccagggcctgcagaaagtcttcaaaggcaagggaagaaagcaacgccctgcctaaacactggctatttatagcacagcaatggaagatctgggaggtggctgagggaatatgaaagctagagagtgggtgggcgggcttccttctggcttccttagactcagaaactaatgcattcttccctgcctccaaagctgctattttgtttcctgtgtaaggtttcaaaatactgcaacactgtccctaggtgcatttgacaatatcagagcaattacagtttggttaaaatctgaaggtaatcaactcaccattctttgctattctctagaaaaagaggcctgaacaaagaggaggagacaccaccatccaattcataaggatggtctcccaaaatcccctgaactttcacagcgcggaaagtttctgtgatttcaagcagagaccaggagaaactatacttttcacctcttctcattaactaaaagccacagctaaaaataaaaagctggagcaattccaaaactgtgggttttatagggcacattaaattattccttatcaactgcaaacctttaaggttgcagagtattatgttaatgctattggctttttcttttttttccccagaatcggtgatagtgttccttaaaaaaaaaaaaaaaaaaaaaaaaaaaaaaaaaaaaaaaaaaaaaaaaaaaaaaacttcatgaacttccaagtccaatctctattgcaaagtaaagtatgggttcctaaatctgcagagaatatcatctattctacaaaacctcacacataacttaggttgattctcttttccaggactgtattataaaacattttgaactgagaacagatcaacagttggtattaatagtaaattataataatcattttacacttgtttcctaatctcatgcatgagattcaaaaataagaaagcagtctaacaacagagaattttctaaacagaatgtgaagctctcacatttattcaaatataaacactaaaaagtgtttagggttccccctggacattcaattgttattaactcttaagataaatttccaacttaataaacttggaaaatggctttttaagcatattttcaatttgttgaaagtttataatattgaatcctatgagtctttttataattattttcttagaaaatttgtggtcaatttcctgtgaccttcgtaaaacttaaacacacctcttagctcacatccataactatgttggcttataccaacattcttcttatattcttcattaatggtcaaggttaaagaaataagagtatttggtctaaactcaaatcaaatgatcatgtgtaacacacagcagcacccaaaacataagcactattttccataactaaaacatcagaacctaaggcatccatttataccaaaatgaagattttagttcagctcttcaggagagttaagacatggccaggtaaattaaggccaaaaaagggcaagtcacaacactatgtagcattcaggaaatttggagcaaatttaagctttcacataaaacagtcagggttaggagtggcctcagagaagcaattatctcattcccaagtcccaggctaacaaactaacagggatatggaaaaaaagactagaacgaaggtaaaagcctacataaagtccaaagacaatcactgctggtcctaaatctatttcttaatgattctgtgaccctcaacaagtttgttatgttcataacttccctcatctattaagaacagatttttctcactctgctagcgaacagggttattaaaagaaataagttataacaaattacagataaaagaatggcttataaaaaatttcaggcactatacaaagtagggtattgttctcaaggcactaaccttcttgagaattgttttctgctttcatgctctcctaaaaacacatctttaatttatggtaaggtcaaactgccattatcactgcaacctgagaaattcaaattaatggtcaaagatacacataaacacacacactccaggctttgctttcttctttccctcaaaaggtcatgttttcaccaaacagatcaggaattctacaatatactacgttccaagtaccaaatatttaagccaccaaaacatacagcagaatagcatatttaagaaaagtttcttttttttctttccttttttttttttttttgaagataggttctaattctgtcaccaaccaggctggagtacagtggtgtgatcacagctcactgcagcctcctgggctcaagggatcctcctacctcagcctcttgagtagctgggaccacaggtacacaccaccacaccccgctaattttttaaatctttttttgtttgttttttgagatggagtcttgctctgcaacccaggctggagtgcagtggcgggattctctgctcaccgcaaactctgcctcccgggttcacaccattctcctgcctcagcctcctgagtagccggcaaccgccaccacgcccggctaattttttgtatttttagtagagacggggtttcagcgtgttagtcaggatggtctcgatctcctgacctcgtgagccgcccgcctcggcctcccaaagtgctgggattacaggcgtgagccaccgcgcctggctaattttttaaaatcttttgtggagacgaggttttgccatgttgctcaggctggtctcaaactcctaggttcaaaggatcctcccacctcagcctctcaaagtgctagaattacaggcgtgagccaccatgcccgaccaagaagtttctttaacataaaaatgtccaagcagataaccaagtcaaaacacttttattactgaacagcagacggtgatgttttagttggcaatttaagaatcacacgctatagctattcctgaaaaattcaaaatcaaagtacatcgtaagcatttgctcagaggctagcatagtgcttaacgcagagtcttagcattctcaaaaacatgcaagaccagcctggccaacatggtgaaaccccagctctactaaaaatacaaaaattaaaaatacaaaaaattaaaaatacaaaaaaaaaaattacaggcgtgtggtagtgcacacctgtaatcccagctactcaggaggctgaggcaggagaatcacttgaatctgggaggcagaggttgcaatgagccaagatcctgccaccacactccagactgggtgacagagcaagactgtctccaaaaaacaaacaaacaaacgaaaagaaaccaaaccaaaacaaaaaaccatgcaagagcttaagccattttaaagagctgcaaccatgaactaagatttagcctgaagacaattagcgtacgttccatcccataccaagaaaaccactttatatgctcaaatacttcttggtatattctgccaatgaggcgattctacctgaatttattaataaactatttaccagcctgcttgaccaccaaggtttggtaaacagacttgggcccgatgtggaagcatagctaaggatggagaccccggggcacaagaagtgagctgaagtgaaaccaggaaggaagacaaatttctttgatagcctcttctctttccaatcccagcttcccatctcagttgctcattgtgccttcatcccctctcccatttgagagctcagctgagtctgcagatatcccaagatactaactggtaactatttggctagagtgagagcccacttcattttctatgcatccaacaaactcttatctcaaaagggcaataagcatacctggaatttactccaatacctgtgaaaggtagccaaactctactctccggaggcgtgaagtcatcatacttccagataagacattaataagcagaattatccttacctcatttgttacactttagtcctccaaattaaaaacagccaaagagaaactagcttgtaaacaaaagtaaatattcaaggtgccaagactggaagacagcaagatctcactcagctcacagtctgaagccacttaaatggagtaactccaaggaaaaccgaaagttaaactgaagaaaaacatgtaacttcagagagcatgaaaaactggtacaattctgcacaactacaaagtggccatgcactaacctgaaaacaacgaggttcattattgaataaaggcatcaggaattcttggagatggagctttcaaataaggctttagtcaccactaaaaggacacagaagaaaacagatatgcctcaaatatcaacacatttgaaggacagacatctgcattcattctaacatgcaaatcctatgtgcagggcactgtgctggataaccaagatgactcagataaggagttcccacttactgtctaagcaaagaagggaacacatgcagaaccacaacacaggacgcaatctggtaagtgtgagaaggagagattgtatctggatgacagatgaaaaaaaaaaatcaggctcagaacagagaaaagccatgtgcactaggctctctgttgtcataggttcaaataaagggcaaagtacacatagttgcaatcatttttaaaatgctgggcacaggccgggcgcggtggctcacacctgtaatcccagcactttgggaggctgaggcgcgtggatcacgaggtcaggagatcgagaccatcctggctaacacggtgaaaccccgtctctactaaaaaaaatacaaaaaaattagccgggcatggtggcgggcgcctgtaatcccagctactgaggaggctgagacaggagaatggcgtgaacctgggaggcagagcttgctgtgagccgagattgcgccacgacactccagcctggggccacagagcaagactccgtctcaaaaaacaaaaacaaaaatgctgggcacagagactatagcataaacaagacaggtactaagggaacttagtgggagagacatattaaacaagccaaagaataaagctaatgtttagaattgcagttcatgccatgaaggaaaaaaggatgctgtgggaataaaactgggacagtgatcagaagaaaagccttctgcagattaagtgacatttaagctgagatctaaagataaacatgactacatatatgtaatacttggtctttggaaggtaaaggatggtgccacacacatactaggtagtgttgggggcagtgggactggtgaataagacataatttgtaccctgaggaatgtcatcctagggatgcaattacatccaatatgtggaacccagcaggcagagttttacaattatggataaaacttaagctacagagatcttgaaacccatctatcctcaaccattcctttttatcaaatgaaggaaatgaaacccagaggctggctcagtgtttctgaactaggtaggtgcagaggtggggcacaacctgtaactcccattacatcacactgccaattaactttttaatcagaatttatgtggaatgtcagaattcagtaaattgatcatgtacaagaaacacttaatatccgtagggaaaaataagtagacttgggcctaaatgccaagtacttcactagacattgtgggaaaaatcttatttggttccaggcaaaataagaaatgtaatgagttttttgtaaagtgaaatatattcaatttctcttgtgaagttacgtgcatcctactttggggcatctaagcaaaccaggaaatgacagtgataatagataatgtgtcagatggtcttaaatgcctttccttggcaaaacagagttgacaaacctattattcccctcccacaatgtacagttttacttcttattgtacttccctgagaagtacatatatcaaggaacaactgtcacaatgagggttgaggcagtagagggagccactcccagagttcacagcagcactgttcatcaaagcacaagaaatgaaaacaaagtgtttatcaaggaagatgaacaagaaagatatgaagataaagtcatacaagttcacacaattcaatgttcttcagcagccaagtaagagcccacacatagaccaaagcatattataaaatgagaattttgatgaatttaacttagtgtcctggaggacaaaaaaggacttaggatcttttagttatcacagctgcacctacaagtcaaatataggcaaaatgaaacatttttaatcagatatctcccaaattttgcattactttaaggatagtgtgaaaacaaaaataacaagggaggaaacaatccccttcaaattgaagccactatagctcaatcctcactgtctcacgtctgttaacccaaaactcccagtatgagtacgaatcagtcacgacatagaaatctagacctattctgtcaatgagcagctgctccaggtctgcatcaatctgtaaacaggtatttccaaagcatatgaccagctccagtctgagcagaataacagatcaaaactggagaggacacacaatgggaaaagtagttgatcggtttgatagaggaagagacactgggtcccactcaaaaataaagtatctcaactttttcactgaatttacattcccaaagaatagattgtaaaataagtaagaatcccagacttttcggtacttgaaggtcactatgaggtcacctggcatagtgatctactgcaagaacagcctgactggtcttcactgatgctacattctattttgtactctgtctcaagctagctgaacttgagagacttctaagtctatccaaggacatttgaaacatttgtgataaatgcagagtatttatctctgttaacaatgaagaaaagtcaccttccagaagaattgctgtgaaagcccacatcgtgtgcactattttttaaaaagtaacatagaaaagctgtttaacataccaggaaagtcaaggagaactttaaaaaaattataaccataatacctaatttcatcaaaatgatgtaagcaacaaagatctaatttatattgagataaactatataggctcagactattcaggcaaggaaccagtaaatgcttatttcatactgaaatttacaggacatgaatgacttagcaatatatattgaccctgagctactgaaatgacaacaacccaaaggtgattactgacatatcagaagaataacaatgaaacttgagggcgagagtctctttcacactttaaaaaaaaaatgcagctcaataaaaatgtacctattaaaaatagaaagacagttatccctttcaactggtgttgatctgccctttattactggagatagactgtatcactcagaaagttaccctgaagctataagaagcttggaggaaaatattaaacttcaaggtacagataggaccaggagcctgttaagacagaaaacgaagacattaatgttcaaaaagtatataagcaggaaacctgcagtagtctcagtaacagattttagtggcaaaaaaaaaaaaaaaaaaaaaagagagagagagaaaggaaagccttttaaaaatctaagccactggaattttaaagtgacacccacatgacccagtttacttttctattcaaagaagttctgatgctgtttctctatttctctttggaagtttttcatgtccaatatattgcaaaagataaaaggtacacttttatttaagcacacaatggaataaaacatcactgaggaacttggacctgtaaataaattttaatgggaaagacaagaattcaaacatgaggaaagggcaacagatatatatacggcaaatgtgagaaagaatatgagcatttggaaaaggaagacaacattgttggacagggtaggatgacagctattaatttaatttaggatatgctaggccatgctctaagccgttttaaagggcattacccccctgtgatcctaataacttaataaaatgggtcatttcatccccattttttttttttttgagacggagtttcgctcttgtctcccaggctggagtgcaatggcatgatcttagctcactgcaaactgcctcagcctccagagtagctaggattacaggcacccgccaccatgcccagctaatttttctatttttaatagagatgggtttccaccatgttggccaggctggtctcgaactcctaacctcaggtgatccaaccgcctcagcctcctaaagtgctgggattacaggcatgagccaccacgcctggcctcatccctatttttcaaatgaggaaataggcttaaaaaaacaaaaaaaaaagattaacttttccagaactcacaaaacctgccaatgtgggtctaacaaactccagagcccatgctctttgcaccacacatcaatgaagcagctaaaataaccaatatcttgcttcaccccagaccaattaaataagaatctctcctaagggcccagatactggcatttttatcagcacccgatttgattctaatctgcaagcaaggatgagaaccactgtaaaagacttttgtaagacaagtggactatcagctaggtagtgccaaacaaacaagagtcaaataatcagagactggggaattcatccagcttttagagggcaaacagaagttcaaaaacagtggaggtgctgaggcagagctgatccagactaacttcagggaaagtctgaacacaggctttagtccaagcagtgattaaaaaggcgcaaaaaaccaggttggaatcattttgctgagagaatgaactacaggttagaaaatttttacttttaagactgtaggtaagaagggagcacaaaatgacttttacagctaatgtaaccaatgggtatgaattttaggaaaataaggaaaaaataacagttgactaacctaaagccaatggaccaggatataaaatataacaagtgagtgacaataaacagagcttgctgagcaatcggatatagcctagtagttacaactgttaactctacggtgatcccttctagcatttgccatcctaagtcttgatttcctcatttaggaaatggagaaaataatcctatcatctcattcagttattggaataaatatatgagatatggcagtcccctttttaccaggcactcaaaagccccaatagatgcctgaaacttcagatagaactgacccctaccatgttttttcctacacatacctatgataaaatttaatttctaaactgggcccagtaagacattaacaataactaagaactgctgtaacagtacactgtaataaaagttatgtatatgtgatctctcagcgtatttagttttctttaagtcgagaactttcacctttttacttaaagggaacatggagcactttaacatcctctctttggcatgtcagaactgccagcatcactactcttgtgctttggggccgctgaaagtaaaagaagggctacttgaacacgagcagtgcaatacctcgaaagtcaatcttataactgagatggctatactaagggactaacagcatggatacactagacaaagggaggattcacatcctgactggtcagcatgagggtacatcacactattcagaagtacacgcagtgtaaaacttgtgaattgtttatgcctggaattttccatttaatatttgtgaaccacagttgactgcaggtaacggaaatcatggaaagcgaaactgtgggtaaggaggaactactgccatccaagcaaaagaaaagagaccaacggcttctgtattcttatagagggcagtgtaagaatatagtcccccaattttttccttcttaccattacaactttagatggccttgttaaagactcagtaaatggggaatagaagtttggcctgcttattcagttcctattagtccctatatagagggactgcttattcagtccctatacagagggtcagtgaccctctatatcagtctaggccagtgcccagacactagacgcagccacaagaaatgcaagttttcctaaatggtaaggtggaatgtatgtcccctaaccctactgaagtgaccgtcatttcacaaatagtgaatttatatattaagtgatttattaaatttatgctacatacaaaattacgtattaaaatgcatatgtgtcctcaactgaattcttgaggcatagtattgaggaaacagttcaaaatagtaatacaattcggtaaaacttttaattatttctcaaaagaatccacacaacttaaaatctgacacctgctgaatgataaagcttggtcatctgcacaacttcctattcaactttcattttcacaaaccttattttgtcttaagatgatttccacgcactcagcagggtaatcttttagctaaatgatccgaaacccacaatctgaatggcaagaaattgcttcctaaataatgtatcgtattatacaagctatcacatatctcccttccccagaaaagtaaataaacattcttaaagacagcccagaggaaaacagtatggttgcaaaacagttagcttcttatatctttcaagactttactaaatgtcacttataaatgagaaaacatatttgaagtttttaagtgttctatgctttttaaaccctttcctgaatgtatacaggtaggacactcagaggtaaggtaaggggtaaccatgttcctaaattacattaatttctaatgcctgaaaccaaagttttcaaagggctataaatgcttgaataatccattaagatacacaaaatgacaggttgatggtaaaaaaggggaaaaaaaaaaaacaacctttcaacaaatgacaaattttctcctaaatcattctttggttagaggaccaatgtaaaagaggcaggtccgagtgctgttttgtactggaaacaaaacagatgtaacaggtgtaatgaataccagagagagatgagacagaaaatcttgaaattaaacttctgtggtagaaaaaaagagagggaatacaaaaatatatggaaatgcctggttggatgaaaggagagtagatattctaaccaaaccatttaaatccacattattagacaccccaatacccgctttcccagtctgtgactgcacaggtaaagccaaaatatattttctgctttggaatagattttctacttaggattagttacaggcatatcggctgctctgggaattcactttcaaatataatgaggccacactaaaaacttgaaggaagtgaaatagtatccttcatctcatctgtcaccataaagctcaacgtaaagaaagctaaaaggctcactgcagtccctcaagaaaaagttaaaggtttgactctctgctgattaccttgaatagacagccaaattaggctggagcaaataactataaactgactatctaatgtaactaggcattagccattcatcccagagctttaattttatgttttatatattacggttcccctggtgattttccgcatacctcattaagttctgacttgaggatgtctgctctggacgagcacacagagcaacacaacacaaaacatcctaaacctcacatctcttagtatttccaacacaaacatcgcaggtctcctgatgaacacttaacctctacatgttctctaagtacagagtgcctagagtctcagagctgcacagacaccagcagacattctgtgaaaacactgccaagaccctcttgacatctgtggcaaaaacatcctgtcttctaaatatatgttctgtttaagtggcttttaaagcataagcatggtgcctttaaaagcagtttgtaacaagaggtcaaactataaaactgaagaggttagagaagaaatcaattgtatatcaattgtcaaaactcaactttaaaaggcagaggtggtcacaaactactgtacagacagggtaaatggaaaagaaatctccaggttgaaaacggcaaatgctaatcgcaggggtgggagcaaggagtcttgaccaatcgtaaagatgagaaagcatttcccttctggaatgaaaaactaaaactgtagatcagaaattcaggggaaaagaatcatttctgttcatgcctcgagaaattaaatacccttacccctgttagagaactgaagtgtatctcccaaaattaacatgttgaaaccataatctccaacgtgactatatttgaaaacagggttgtgtagttcagtagtttcagtagaaacggtacttcaagtaactacacaaccactctgtttttcactctatttccttaattatttcaggaaataaggctaaatgaggtcataagtgtaaataattaagaataaatgaggtcacaagtatggggccctaatccaataggattggtgtccatataagaaaaggaagagacaccaatgatttctccttctttacatacccagagtaaaagctaagtgaggacacagtgagaaggtggccttctgcaagcctgaaacagtggtcttgccagaaaccaacactaccaaaaccttgatcttggtcttccagcctccagaaccatgagaaaataaatttctattgtttttgctacccaggctatggtattctgttatggcagcctaagcaaactaatacaacccccacaccaattcttaatctctcagttgtcttttcctctcattgctgccacccaatcttttcctggaatctgaaccttaggtatgcaaatagtccccaacttacatggtttgacttaacagtttctaaactttgtaatggtgcaagatcgatacacattcagtagaaacagcacttcaagtaactacaccatcattctatttttcactgtcagtattcagtaaattacatgaaacattcaacacttttattataaaacaggctttgtgttagatggttttgcccaattataggctaatgcaagtgttctaagcagatttaaggcaggctaggcgaaagctatgatgttaagcaggttaagtatgttaaatgtattttctacttatgacatcttcaacttaacttaaagatgggtttatcaggacataagccccatcataagtcagagcaccttcttgtagccactgaaccatgccccctcgcttttgaatcaacactgtcatctatccataactgctaatttaccttcactaaaatgagtgtctaccaatatctacccctcatcctccaattcccatgagaccagggcaagcctttatcatcatatacactgcttcaaatctgtctcctcctccaacatgctcatctttatataatggctagcttcaacttcccaaaaacatctcatgctatcacttgctcaaataccatcaattgtatacatacagaccttcatttaagggcctttttaactttctaatccatccctaatgttttctcccaacttctcaagccaaaaccctgcataaggtcaaaatgacccataaccatcctctgaatctgttgcattattttatttacttccttttttcatatttttcttttattttttagacacaagttcttactctgtcgcccaggatggagtacagcggtgtggtcacagctcacggtggcctccaactcctagaatcatgctatcctcccccgtcggccttccaagtatctgggactacaggcatgcatcaccacacccagttattttttattttttactttttgtagacacagggtcctcactatgttgttgagactggtcttgaactcctggcctcaagcaatccctccccgcaaggcctcccaaagtgctgggattacaggagtgaggcaccactgcctggcctgtttccttgcttttattcctattgttgtgacaatttggaatgtcctctctgcttatttcctttctaaatggcagctggaagaaagaagttctgaagaacattacacaatcacaaggggcttgttatggcaaaaccttctaccctcaactgctgctctgccacatactgattttattcaaataggcttttacctccaccaaatcatgccaggtacttacacaatatctgaaagatggtaccaatttcagctccacataaatagaaaatgggaagatctgacacaaatgaaattcagagttttcagaggctctcatctccccctaagtattatcatcctaagtaaggtctagagaccatgagacacacatatagatttgatctgagctcaatcagttcttctctcaaaccctcaactttttttctaaagctatcacctaaatcccagcaacaaaactaatagagtctctcagattttcccaattttcaacgatcccctcccctatcattcctccaaagaacatcataacaagcctcttcaacactctctttatgagagcctgagcttcgtaacctatactggatccttattgattttcatcatgtgagtgacaaaacacagtaatatactaagatttccaacaacctgaatacctggctcttgatttttacatgcccccaaaatagcctctgtcccactcagtggactttccacctccaaacttttataactattttctccactcatgatcttctccctactggttccaatttacacgcatgctcttcattataagctttgctgatcttctctaataaattttgcttacccctttaaaaacagtcctccaagagctctttcctggtaacttagcatgcactatatcatacagccatttgtaaggccccatcaatgactccacctgtatgtggtcatctttatatagaaacccaaccagaatggagacataaaattctagaagagctttagttctttcatcattgtgatctaaatcaaagggcactgcagtcagcagcacccagagatactccaatgtcactgactagcataccaacagcattcaagctgcttcatgagcttatctttccccttctaacttcagggttggtagggcaaagaaatgacaccaatgacatctacaatcagggcctggaatcaaaagcaaactgatagtgtaacattcagggacttcagtgacactttcctagaacactgagtgcccaaaagggctgggccatcagcttcccctaaagaggggaaaagaaccacccactttctacaacagattgactgttaaacacacgtacagcaggcctcttgcaggagaaaaggcaagctgtcctgccagagttcctaaaagcttctgaggacaacaatttttcttagggagtgaaaatatataccctaatccatactggatagacagcccccatttttcaaattcaaggctgaataagatacattcagttttaaacattcctagaatttgagaattccaaagtatcaaccatttttacatcaaataactacattagtcaaaccagactaattattaaaattacacaaagcttgtacaaatcaatccttaatgtttaggaaaatcatgaaaaaatttgtgtggggaaaccagtctaatcttttcagatccagtacaccaaccacttggcaatgctccctacaatctgggaagatttcctgaccaatggaatacagataaaatatggcagagtatgcattaatccttccatcttctcttgttttaataataagtagagagccaggaccatacaaattaggtatatacagctcctagaaaaataaaatttaactaaagctaaagaagatgaacacttctttaaccaaatttcccaccttattttatcttatgcacacctacaaaacatctgtatacatgccttataatagcttttgatcaactgctatcaaaacaaactaaaggagtaaaataatattactgctcttcagacattaaaaaacacatttctaagcaatattttcaaagtcaacaactttgaaaaattaagtccttatctttatagaccacaggctcattataattaagtgggtagtttgtttatattttatataagattccctaagaacctaagatcctgccagtgtctatttaagaaatggagaaaatgttgggcgtggtggctcatgcctgtaatcccagcactttgggaggctgaggtgggtgggtcacctgaggtcaggagttcgagaacagcgtggccaacatggtaaaatcccatctctactaaaaatacaaaattagcttcgtgtggtggtacatggctgtagtcccagctactcgcgaggctgtgacaggagaatcgcttgaacctgggaggcggaggctgcagtgagccgagatcacgccactgctgtccagcctgagcgagacagagcaagactccatctcaaaaaaataaaaataaaaaataaatggggaaaacaacattgtaagtactggaaaatactacgtccatagtcattgatatataaaatgtctcaaaaaataggactgtcataaaatacagaacctcttacagagaagaaattttaagttgccactattaaaatggaatttaaaatctcaagattccacatatttaagaacgaatattcctttgttcatcacaaagctgagacaaaaacaagacatttaatggcaatgtgtctcctccctgaaagttgattttattgctatttagcatttccaggaaataatttctaagagctaaacaatcatttttaatattgactcctcttcacagcccgctctgcagcaccaccaccttcttacaaaccgggggaaaaatgcataagtggatgtttaaattactttcttgatcaatattgtttcccaccagattttggaatattatgaaaacgaagtgtacccattttggtccttggaccttcaattgtttcttaatttttatgagaaacaaaaatttgaacagtaatatacttctgcaatccaaagaagaattaaaccaaaagacaaatgatgaactttctaggtcctactataaaacactagagttagaagggtgatcattgttaacatacaactctggttcaagccctggttatggggctttcactgggttattacagttcttgttatttacaaatgtggaagcttattacatataaaagctcttacttctaataacctttgggtaacttgcaatctccatttaaaaagcctcttcctcacaattactgtccatttgaagagcgatttgacccatactctgtcctttgagacatcacataaaaggactctcacctactcaaaaatcaatcttttcagtcagatgaaatcttaatgaaagctgagatcatctcgaggaaagcaaaatactgccaaaaggcaaaaacagcttcacactctaacggtaaacccacaaaattgccagattaaaattctgctgcttagtcattatgatccaaagatgcatgacttgcctcactagggcaatggctgtctataagtaagatatctagagtttacaccatccttacggagagccttgacactattattgccaaatctatacgtagagttagttccctgcacaagaagatatttaattatagctctataattttttttcaaaacagagtaatatcccaaatatgtaaaagatatcctgagaacaattgcccttgcccttcgtcctttgtataggttattctactgattcaatatcagtcatggaatatactagagaaaatagattctgacttgcttatctcttcattttaaccccattttcctcattccaaatagtaaggatgcatttgagagatagctaactataaagaatgaggacagggacaatggactgcaaagctggttgatgcagagtccaactcacaagcatgacatggtagccaatttagctaaatggacacaggttgaattaacctgacctttatgcttcaatgtcctaatttgtacaatagctaccatctgcccagctgagtcctgagcagctaacaacaggatttgaagagtttaagattcgagacaaaaatgaaccaaaatccagaatgaatcctactaattctacttaagcccaaaagtgaacctctatcctctgtttaaaagaaaaacacaggcgttttcaaaaaaatacaaccagtaaaggcactacaaaaacagcacggctttctaaatatcattaaactgatcttaaattgtaatgcatgctaagtccctagcacatcacaggaacagtgtaaatataaacacaaactaaatgaagaaatgtgtaagtcatcttcatgttatctggtaaatctcatgtatgatacacttcaataaaatcccaaaggccagctattgggaatttaaaacagaaagggtgcttggtagcaggaggggcatgggtggtagataatgacagaaataattaaaggtagggactgagaggagattttttaaaggacaccaggtgtacgatttaggtttgccataatgatatacttgagtgaataaaaagtatgggatgcgggcgtggtggcttacgcctgtaatcccagtactttgggaggctgaggcaggtggatcatctgaggtctggagtttgagaccaatctgaccaacatggagaaaaccccgcctctgctaaaaatacaaaattaggtgggcgtggtggcgcatgcctgtaatccgagctactcgggtggctgaggcaggagaatctcttgaacctgggaagcggaggttgcggtaagctgaaatcacgccattgcactccagcttgcgcaacaagagtgaaactctgtctcaaaagaaaaaaaaagaaaagaaaagaaaaaaaaagtatgggataagaattcatgggtcatgatcaagagaaaaagttatttggctagttcatgaagtaaacattgcatccggcaaagaagggagaactctgaatgcctgaaagtgtttgaaatctgttctgtaagcaatagggagccactgaaaccttcaggcaggatgacagagccaaagctgtcctttaactgtctcttacaagattctaactcaaatgtgcctaaattctgcaaggttatttatctgaggagacagttcataatattagtgcaaaaaggtcgcaacagcaaaacaggaccctttatttgattaaataatttagttctaacacctgggcagagagaattccagtatagatgttactgtgcactctgaagccagactgcgtgagttctaattccagctctgtcatttactgcatctttgggcctgtaacttaaatcactctacgtgccatttccttacctataaaatggcgggggtggggagataattataccacctacatctcagagttttgtaagaactcaagtgagtgaatccatgtagactgctgagaacagtgcctggcacagagaagcagccttcaaattatgctgacacaaccacttctatgccataccctttgacatctgataaatgttactgtaacatttcatataaagtatcagaatatggattctgcctttgtagggggtgtgtgtgggaagggagacgagggaggagtcagatttttctgttcctatccttcaaaaccacaagctaaaagctatacacctaggtgaacactttccatttccaataggccttgtccatttttcccttctcgatggtttaaaatggttcccaggcacacgtgtaattaaattcattatcttaaaaaactgcttcaggaaatgcagcaatcaaatctgccaccatctgttttttatagatagatataattacaacctaataggcatcatttaatcaagacttaacaattaggttcttaaatccaaaacttgatcattttcttccttgatatgtgtacaaaattttctcccaggtggtggtcatgtaaagtgaaggatggaagaactattaaaacccttatcataatggccttcctaaagtgctaattattacacaattaagacagacataatatgactagaaagcctaagaaaatctaatgcaatctcacagaagctttttaaaatttttttccatctctatctccaaactacctaccaaaaaacccaaaatacaaaggagtacctctcgcctatgacttcttaacaagcgaagtcaggagtagcaccaaaccttcccctggttctaacatcacctagtcagatctttagaggagaaaagcaatcctatctgttaccttgtttcccatcccgcattttaagagataagaaacccaggacctgaaaagtgagtattttcctaaggcactcagggtgaaacctggactagaacctagatgtccctccataaaaaacaagattttgtactcttactccaccccaccacgtgagtggggaaaagcagagttttgagggcctacaatcctcaagtctgatcactgggtctctcacatctaattacaatatccagccccatttccaacttaataagattaattctttgtcactgatgctcaatagtaactcttgctactcccagcagccaacaccctagtttgaaagacatgcaggtcaccagtgcatcttctattgagagcccctaattgccttaccacacccaaggtgcttcctgctagactaagcttctttacagacctaacacaccaaataagagaccacagttgggcaagaaatctattaagaattagaaaaccctgaaagggctctatttaccactgaaaagaaaaatcttaagccctttgtagtttcccattctctttcctttcccaaaagctttaagaggtctcccagcaaacctaaaccaagccctcacttttaaacacagctgtccaaggactctgtgggtgggtgcaggggacagacctaatctttccctatgcaagatttgaagagtattagagaaacaaagcattaaagaaacaaaagccttaaagtccaatatttctcctaaaataacctcattaaggcaagttttctttggtcttccaaagaatcccaattcaaaaatgagaaaagaaagtagctaataatgagggcttcaccataaagcatcacaatcaacctttcattattcccattctgtaggtcagacatcgaaggcttggataggtggagtgactttgaatagggaccccaaattctgaactggaggtgtaacaatcaagtcctaaaacagtagagttcctattcctcttctcagcttattttaacaccaaatgtgtaacccagggtatctgctcatgcaggggcctaagtgcacccttcacaacccgggatggtagtgcccaagagcagctctactaagccagaatgagcaaatggcaccatgcttacatgaggagaaggacctcacaagctgcagaacatgtccagcctagcccccttccctcttattcaaggatgaagtgaaatgcactacagccctatatgcttaagatatcagatggaaattttaagaattctttcaaagaacataggtcattatccccaactttggaaaactacttcagattacttggttttggggagtagagaatcagtatagaatgcttctcaagcaaatgaatctacaaaattagaaaatttgacttacttaaaataacttacagtaaaagtttaaaactaaactttaaatttagtttgggaaaacagatgacgtatgaaattttttattcaaatacgaatttagatctatcttcatctgatacgggtgccttcaagggcaatgagccgctttttaaatctcctcagaggatcctattcacattaaacagaagccacaggaaaactggcattaacatttccttcctgcttgttggaaagcaaggcaccttatttgagggctttccagatcaagaacacattttataccaataaactttacagctgggcccagcagagatctacaaattaaggctaattgtgaactgtacagcaactgtccttcgtcttccatttttatattttatttcaatttggagctacctaacagacacagaagccctccagactatttctcaaaactttctgtttggaagtaggtacacgcacccaggaatactgaagtatgaaataaatattaagagcctagaacaaaatacaaaaacattactggaaataggctcaatatgttttaaaataacatttaaaacttaactgctgctttatttcttttaaactcaaagaaattttctcaggtagaagattttttaaagctacaagggatttcaaaatgaaaaactaatatttcttctcttgaatgttgtgcttgaaaggaaaagttatactgtcattcattcaataaatattaagctctacgtacaggagctattggaatataaagtgtgtctttgccttcaagggctactcagttttcagacaagtaaatttcttgcaagcagaaatcccagagtatcaatgatctcaccaacagaagtgtcctagctaagggactttagttttaaacagaaatcaacatcattaagaatgctagatgtcactgttactgacatttcttgatccagttagggtgtataaaggtcaacatctgacaacagaatgttcacgcattagttatccaaactaaaatgcagaaaatgtctaaatcagcacatttgaaactagaaagaaattaattctattacaatattaaatgtggaatcatacacagaaaaataaatgggcacccttcactaccaacaccccattttgcattttaaagggggaagggactcccacagagttttcttctaacaagcgctgcaaataggaattgacaggtggagccctgattgacaatggtggttttagatgacacctcacctccctcctccttacccacctaatctcacgactaatgcgggaagctgaaataaatacagtggaagattgtttatctgtttcgttttgtttttttaagtgcagatgtgttccacaattgaagaaagaggttaagattctatacacatcctgggtaccatttagtcaatgtctacttgagcaacaaactaggacaatgaaaccaatacaggaagaagaaaatgcatggagcaggtgaactactccgaggtgcatttttagctcatgtgaccttccaacgtgctccaagtatgttgtatgtagatgtgtgggcatgtatttatagaaagggtcaagagcgctataaaaaatacattaataatgttagtgctacaagggacttccaaacgctagcccacagcctcaatttttagacagagaaagcaagccccaagacttggccaaactttctagtgatagaatttgctagtgatagaatctggtcatagcattcaagttttcaactcctgaagacaatcttacctccaaagtactccaattccacagctttattcttaaatttacccctcccctagaaagatgactgcccactcctccctacaatacagattccaagttttaagactcagatgggcctagccctgccttccaagaatccattaggctaatccagtggttctcaaagcatagcctgggaacctaagagtcctctgagacttcctcatacatccgggaagtcaagagaatgccttttcctctcataaatgtacagtagagctttctaaaggttatatgtgacacttgcttctgcattcagtctgttgcaatgagaatacagttgactagatctattaagccagacgttaaagaaatgtaaaatgtaaaactatgccagccttactttttaaaaatatacatattcctcactttaaaaatattttttaatatgtaatgggtttgctatttaaacaggtttttaaactttctcatcttaatttcttatacagtaaatatttatacacataacaaacaaaaggtcctggggtcctcaataatttaagtgtacaaagggatcctctgatcaagaactttgagaattactggtctaattcactgctacataagcatgcctttatggtgaatccctttagcccatatagataaaccttagaacagcttccaactactctccttaccttcaaagggatgttcctccagctctgggactatgtaaactacttctcatgcccagtactaccctgatttataagaaaaaaacgtgaatcatctcaactgcctttaatgtaaaatttttacataaacattgtcggggaaacatgaatataactgtatattctggttctcagaaaagatgctttataaagcataacaagctattacatgtttcatgttgcatacttacactggtttagaaaaatgcttgagtatcttatgagtctctcctacacaatacaaagcatgccagaagcagtttttcactttcatttgggggtttacaccctagtcaggaagccatgcatgctccatcttcctctcaaagccctggtgcgttcctcctcaaggcccctttagccacatcagcccatgtcttttgcttcagttttcctcacactaagccatcctgtaaaattgtcccaaggctggctctctcaaacaaaataagagaaatgttcctgtatggatttcagtgtcctctagaaacccacccatgttccaataatcaaaactttttccttacatgctaggagtacaccacacttaatcctcttctcctggggggttgcgggtggggtggggggacaagtccccctatctgtataaaagagcttcacaagtgctactacatctacctggtttcaggaaccttttcccaatgtttgcagcagacctcaccaaactcccataaactcacgttttcttcctctggactgtcaaccagacttggagaacttgagagtggcatccacatcctagtgtttctgagcacccaacgaccatgcacaacgctcagctcaaggcaggcactgaatgctaacaaacagctcatatgtaggaaaagtgcaaatctattaaaatgctctgaaaagcccaagggggatcagcttttgaagtaattagtaattctattataataatttgtgcaaattaaaaaatatatatttgatgcaaaaagataaccacagaactgtttaaaagatggatttattatttatttatttatttattttttttttgagacggcgtctcgctctgtcgcccaggcaggagtgcaatggcatgatctcggctcacagcaacctccacctcctgggttcaagcaataaaagacagaaatatttaatttcttcaaatctacacctgagaggttaacaatttcatgaacactttgaacactttcaaagaaaatacaaacatgtaatggcacaggtgaggaaaagtaaatacttaatacatagatctttttgaatgctctctgaaccttgctttttacatttcaagatcagcacatactctttatttacagatactatataatagagatatataccctgattaatttaaccaatcccctactgatgaacattccaaggttttgctatttcaaacagtgcttacaatagataccttatacagtaaagcaaaaatgtaaatttaaagatagaaattgctggtttgtagtctatttgcatttttaattacgctagtcactgccaaaaaaaacttctgaaaacttatcagtttgcagtcccaccaaagcataacctacatttttaaaaaggaaataatgcagcagtgtagagagggcactgggggaagtaaaggcaagtcgggaaccagccacaaggtcacagtcaccaaccacaatcattatacctaagactttagacaatacatcttagcatcagttctgaatgtatatgaaatgagactgctgttcaacactatgggtagggcctttccagctctaacattctctgatgtccttgaacttgttatatataagaaatgtacattaaatatgaagacagaatgcttatcctcttggactacccaaggacaacaaataaatgctgggaaagtcagctgcaacactgggaacataaatgctctgacaaacccctgctaggaatttcaaaatggaagtgaaattgagactgaagaaaaagaccacctaataggaaatataaaaagccatttcaaaaatgataaacaaaagaaagacgttaatcatttggggattttcctagtttaaaacaaaccacatctccgtaaaagaaatatggctaaatggctataacaagtaagggccaaagcaccctcatggctactaataaataaaacggtacaaacatccctttcaagtctaccatttgagagagtggatactaacaagagatatgatttgctaagctaaataaaagccttcattaacaagaagtgacaggatcacaaccctgctgctgataaactgccaacatacccaaggtcttcaatgaagggttgcccatttaacatactgcagctttaaaatgagttgctttagaacgaacagttctatgtcaaggcaggcctacaacatacaaaacagatggagctgctactgtaccttgggcttgtgtgtgtacccatgcacgagcatgagcttggcatataccacaggagaacctggcccaataacgcttcttaaagttagccatccatgattagagcatctaccttagacctcaacttctctatctgcttccaaagatactcagtgtagagcagaaaacattcttctgatagccgaagagggttccacatggctattaaatgactggcccagtggtcatccatggagacccctccttattcctggcaaacacagtcatttcagtccaaccttgaagcagccaatatcttttcaatacagcacactttgaagcggtattaacaggtcataaatacatgtaaaaagcatagtttcagcttagtcaaagtggttacagaagcatcattgtatatttttttctgggtggtccaagtaaattaaactcaccaactagactgcaaacagataccataaattcttaattattcacaggtatggatgaaaagaaatagcactttaataaagtcatcttaaaatattattcagtatccagcacttaattaccatcatatagtagtgatatctaaaaaacatagaaatgtttgctatagtttaaatattaacaatttttattaactccaattggttaaatatgtaagttatacaacttcatagcaaccaaaataccaaggccgaatacacaattaaaagaaaaaaacttgcatgtaacatttaccttcagcatatataattttaatcttcattttaaagacataggacctattagattcaagaaatcagactagccaggtgaggtggctcaggtctgtaatcccagcactttggaagtccaaagcagaaggatcccttgagcccaggatttcaagacaagcctgggtaagatggtgagaccccatctctacaaaaaaatttaaaaattagccagttgcagtaaagcatgcctatagacccaactactcaggaggctgatgctggaggatccctaaaagcccaggaattcaaagttacagttaactatgatcatgccactgcagtgagactaaatctcttaaaaaaaaaaatcagtaataagacaataagacccactatattcagaaaacaaagttataagaatcactgacatcaaagagcttccaatgtagttgaaagtaacatttaagttgtgccctgaaaatttaaaccaatataaaaagctattaaggagagaccagacaccaaaggcaatgggaagttgttaccccaagtgcccattccgtaacagctccttaactctcatacctgctgtccctgtaatgccagaagtaaaattaaaattctcctctcctgaactaaaacttggtttacttctctccaaattccatcaagagtagaggttactgtctatattttcagtagcttccttctgcacctaaggaaaaggggctgaaatctaaaagctgtgatgaaataatatccacctacaaaaaaatgctatatccatgttaaatcaaacaattataaatggtataagctaaaaggcatgcaaagtttttattatcttcctaaagaccagcttatattaaaaataaaactgtttgccagagtccacctctctgaggaaactaagagcctagtcaagtaagcttaataatctaataaggtggtcagaaagacactattttaaaatatcatatccttgccatgcattcactgtactgtttaggtctggtgatctgtgtgaatgaggaaactagccagatggaaaattcacttcctcattttccttaaccttttttccgtgtcttttccaattgcttagagtaatttcccatattctacccatctcttacgaacatacctagccctttaggattaaggaactccacagaagccactgacatttttttaaaaagtatttttcgacactcttaaacaacaaatgtcttccaaagtttctacaaaaaaaaaactgcctaagtctcttccactccaacaaatattttaaaaacaattccaattaatatggtatttccttttagttataatttaaatgaatactggaaggaacacaatatggtaaagcaatggggtgatctgtcaaagggattatctaaaaggtcattcataaacaaaccaaataatccaatcaatgacaaaacacaactgtggatgaattagtgaaattctaatttccgccaagcaaaaagcctaacaaatattcctaagttcttactgcatcaattaatacattagaaagtgttatttaaacaaatactgataatatttcaaaatccaacacattttcaaagccatgggtaaagagaataaaggatttagacaatgcagatctcactgctgggctttgcattcaccacatagctttcagagtaaaagttgccaaattacgttgtcctgcaaagaacattaaaatcggtttctcgtaaaaaatataaaaagccagatccatggtgggatagaagctgggtggcaggaatcagctctaggactcaaagttcaccatcaatttatcaaggagaatagagtttaattttaggacctctgtctatccttatgcctataaaattaaaaactagtctgtttttatgtacagtaaaaataaggtagctaggaaggaaatcaacaaatgatcttcactaatcacctcccacactgtgttataagccttaaaggttattttccttcacagcacaaatcacaattatatgtaataatttgtagaactttaacataatatctcctccaataaactctaagtttcatatcagcagggagtatactgtattcactactatagtcttaatacctaaggtagtatatgtggcatatagcaagatcacaaatatttactaaacaaatgaaaatctgcacaggaaaccaagaaatgttcacatgtaaactggcaaaataattgcttttaaagtactggggggcagaaaaggctggatcagcaaatcaaaaactgaatagaaggacaatcaaaaagagcaaaatgccattcatgtcaggaggccagacacaataaaataataaaatgttaaatgctaggaaaagagagataagtttaaagttttaaagtggctactaataaaaactttagatgtaaacatttcaaatattcataggctatttaataaactgtcatcaaattgccacatttctttgagacgataacagagaataatcacagggaatgagagagagaaagaaatgttagccataatgaaaaattccttatgggtaaagttccagaaaattccttaaggagtctgaactataacacccaaaacttaacaaagtccctggatctcttaatgcttctgaattccatagggaactggggagctacaaagcattttacccaacaaaatctctggtagtcttcgccaaatttaaggaaacacaacaaaaattaaagagaaatgatacgtattaaggtcaaagtttaaggttactatgtcctataaaatgtgatgatgagtaaaatgctattgagctttcaccctcaacaattaacttctgcttcatcctgtgatattctaaattacagctaaccagtacggagcagccttgtcaggatcccacctgactgctttgtgcatagcctgttggccaattttataccagaggcacctgcttgaaatatgtagagacaatctgatgaccttattttctcacgtttacaccagctttccatagcacaaggacaatatttatactctaggaagagtaaaatatttgcagagataagaaatcagagaacatgttggcatgaagctatttcagcttctcaattctaagacatttggactgaaagatgcacccactaacctcacagctttgggggacatagaatcaggacattaagtaaacttaagagactcaaaagtaatataaaaattgcatatctaagacatgagaaaacatgggattagttaaggcagtttttgcaaaaatttccctgtagagattgaaattctagtaagattacctatcattcatgatttacttacatatgcaaataattttcaattgattatcagtctcatgtactatattctttctttaaattattatctctattccagacttttgagttctgctgttccagtgacctccacaaattttcctgaatttctcctaaaaacacactatgtgagagatcaagtaatgaaaaagagcacatggcctctttctagggaagagcaaaaaggtcattttgaatctgtaattctttgtcatccactcccaaccaatttttctgacagtaaagttggagaaacagtaaagttggagaaatactgaaaacttactggagaaaggtgaatcaagaacaatctttactgggtgaatattttgtttattccaatttggatatcaaacatcctattgaacacttgacctgccatttttttctcagaacaaaaagtagtatttctaaaatcctgcctgattgggaacacattttttttcataaacttaacaagttcaaaaaacagcccttacagattatctactacaatgagccagggttatctcaatgtcactttcacctttttcttgattttaacagcatcctaaaaaaagcctgaagacagtgtcttcatttccttgcttacagaaaataaccaatccatactttgtatggttccaaaaagtaatcctgcaagtcaaggatgccagctggcatcagaaagtcaccagcctgtgatggaaatgcctccagaagtcacccagtcatggacctaaaataatccaaggtcagaatcctggccctgaggaacaagttgtgggcatactgctaggagtgctacagggaccacagtgaagctttaaaaaaaattataaaaataaaaaataatcctggtacaacaaccccaccactggggaaccaaacagcctctaaagcaatttaatatggaggtgagatacaattgctgctggagtcacaccattttatttcaaaacacccctaagagaagcaatacattctcaaacatgaaaactgagttgcttcttggatctgatttcagccaccttaaactacagccagcagaactaccaaaagtagaaagaacatcattctgggatccatggaaagaggtacagaactaggagtctgacctgatcctacttccccacttggttgtatccttgggcaaaccacctgacctctgagcttcattttcctcacctataaaacatcattcccagggagctgtggcaagtttctataaggacagaaaaacttggtgttaatcaccattactagaggaaatgctccgtgtctcctggttccatcaccttgtggtagttcaccatcttcaattgccaactccacgtatttttctatcttcctaatggtaagtcaacaactaaaaagtggcagatccctgctgccccatcccaatccactgctaacttgactgtccaacacaaaatttcttactgttgcattctcaagggagagtcatttggaagttaccatagaagttgtacaaaaggaaaaccaaaacagatgtcttcactcttcctgtctaggtcacaaactattattcactctaaaaccaaagatttcaccctaccatccacaaaacaatgtttataagtcagccaaactgtttgggaaaaaattttttcaaaaagtccaagaaacaagaacacaaattattccccgaacagccagttccaactgaaggaatgagcctctccactaaatcaaaaaggtaacgcagcgtacaagctgttcgatcacctttcaaggaaaaaaaaaaaaacccacgaaacagtaatgcaaatgccattaagggagaaaagcagtggccaggcctcagaacaccaagcactggcatgagaaagccatagtcagcagcccagacaacacatgctcctggaagacatggccttagccatgaagatgacgcaaggagaaggcatagatcaatgctctgaaaagcaccccagcttctgtcctgttacttgcttcttgctcctgcaactatattcccaaaagggaggaagtcaaaaaagttgtaattattttgactttttcctaggtgttttgaaaaataaatgttatacccagaggaggctgctggcacataatgttgtcaacagaataaaactctgggggaaacacccagcttcatgtagtttgaaacacaacgtgcctcagatctactcttctgggacaacagtggaattaagacagtcacagcttgtctctctctagccacaccctcaaacttgagtaggttttgcagaaatacttttcacctgtgactgagctcctggcaaactaggaaatagttactcataccataaaagaaaatcaaaggtaacaaaaacaatatgggaggaacgggggagggaaataagacataaaaagcaaaaaatagacaaaatggaccaagaaaagacacagtcctgtccctaaagcaataagcaacaacctggcctgatcccttgattcccagacaacagggatatatctctttgcttaattcctcaagcactcagtttctactattaaatgcaagagtggggagtgtgtgatttttttttaagttatcattttctgcctcatctccttaggtagagaccaaggaatatgaggtaaagggcactttatacaagtctcaacgttctcagtatccagcactcagtaatttgtgatgaaacaataagtattacacaatcttcctggcttctgaacataatctcaacacaaaacctagaagaatatttttattgatccttcaacaaactcaaaaacaaaattagattaatttggaaaagccctaagcttcaagttaactagcagcccacatatatcaaagtcattcttattgcacagtagaagctccacgggaatgactcccaatctttagggggataaaacatgcttgtttttactgatattcaattccccaccccaacccagtaactaagccaccctgaggtgccgcaatgagatgctgcagggagcatcaaaaacaagcaacacgttcacctaaaagaatcatataatcatagaatagaagatgcttggtaccaagaatttttaagtgcctctgaaaaataagttccaaatgtacctacaatgattttttaaaatcatacacagttaattcaaaattaagtttttaagtgagcatacacttatactaacactccaaatatcaaaaaaaaaaaaaaaattggctgggttgtagagtaagccaatgcttaaaactgccaacattaagctattattctgaagggttttgctaagatgttcaatacaggggcacattctgattcatcgttataactggcctagctgaagtggctgccaggagagcagggttttatgggcattgttccatcctaagaagctacattaatgctgggttgatacaacagatcttcatatctatttaccaggctgaacaaaagttaactagaaatgtaagtgcttaaagtcaccaaaaggaaggctccacactgacattttctacctacttagcattcaactatattcatctcactagacattaacacacaccaaagttgctctctgctattcaaattgtgctattatgctcaggagtagattaatattatccaccttccttattgtaaaataaaattacagcattggtccaaacatgacatgtggagcctctttctacttctgctggtgcatcagtctgctctacggcacacataggagagggccttgctaaggctgccctgctgcttctggagtgggggagaaaaggctgaagactgaaaaaaataaaggggaaagggagagaaataacacacacacataaaccacacacctggaagtctcatatcggctttttttttttttttttacaacaatcttataaatctgttgtcatttataagctcacaacatcagcaatgaggttagcaggtgggccacaggcctcttttaaacagctcataacatcctatcagtttttacagcatcaagtagcaatgttgaccccaaagcatctgaataaatagaagcaggcaactggcagggagaaatccctactcccaatggggacagttctaaaatcccagggggggaggagagaaaaggtaagttaagctgagagaagctcattttataaaaggagaaactgtttttcaaccacgggttaaggaaggagagacccaagacaaatcttctctgaagtaaaggagactataagatctaaatatgtaaggagcagtttaacatgattcaaacattatctgtaaatacaagagatcaaacgaatataaaacctttagaactactgcctttgtctttacacttaactttttaattcacgtggctttaggaagtatagcattagagacaccaaggccaggcaaacaaaccaaggtcaaagtgaaacaagccatgcttcatccttaaggcgcagtcgataaatgtggactccattgttgttgctccatccttccaagttttcaagaagcaatacatttggctccagatctttatatattaccaaaccgtaaatcaacaactcacaactatttaaaacacagttcagggcaatcaaaacacctataggccatatgaagctcacggatcacccttcaggacctgtggcacaaataatttgtccactgataccaactgctccttctggtatcagtgattcacttggtcacagaagatattcttcagtaagtaaaatgtaacaaagtgcataagagccaatgcaaaagcccaagcaggataagaaaataaagggacaagtgagcaggttgcacctgaccccaaattaccaggacctggaactaagcacaaggctaaaaggataaacaagggacagagggcaagtacagacgcatcccaaagaggggaggaaggctgtgggtagttcaaattccttgcggagactatggagaagggaagagatgaaagtcaaaagcactgatgacctcgtatttgggaaaagtccatgggtcattcagaggcacaggacagaaaagaccccaagggtttttaaacaaaataagccagcaatcagtaaatagcacctggggagatcaaaagtggtgttgaataaactcaaatagaaataggccttacctgggaacaggttataaaatcttgctccctctataataaatgttgtatatttaacacattctggatacctctgcaataaaggtggatgaccccctcacctgccatatcacctccaataaagcaatatcagtataacaagaaattcttacttttgaaaagcagctcagagaaaacaagatcaagtgctccagaaatattttcccatccttacccaattcactgaatttattttcagatacactgtgatttgctttattctgatatacacaaatgatgcctaaagaataaaaaaagtgctaaacatcctttaaaagctgaacaagtgagcaatttccaataacttacttgacagggcatccatcaatgatgttcacaccatcagcaatgaggggaaaaaaatgtatttctatgtaaactccattttgtgatgtataggaatggatccttgataagaggttaaataaaattcaaatcagagaaaacgcggactattttaatataaatggttaaatttaaaattttgatttttcactgaaaaaaatatgagaaatttaaattaagaaatttatattcctggaatgttagctggctaaattctcagtctcatatgtaatcttttagcattatttatattttcaaggaaaatgcattttaaactttccaagtcccatcatcataggtataaatatgtctatttccatactgaaatgtccaaagtcacaattctcccaaatcctccctgcagtctgggatttttcttttacttcatggcagaaataaacatatgatggtgtattataaaaaaacaaaatcactaaaaatggttcataacacattgaaagccaaaaatataaaactaatcaagcagtaaccacctactaccacctttccaattcagtcaatgtcatttcattgtcaaaaaatcttgtacttcaatatgctcatctttacgtggtccttgagatggggagggtaagattttatacacaatcaaaggttaagaaaccaaggatataagtaattaaaccaaaccagatgctgaaaacttcagacttctagcctactattttccacctggctgtgctaaattaagaatttcaacctaagtgacaaaacctactgagacaactcagcaaattggccgcacgggcacggtgatcacaagaccttatgtgtgtgattatttgtttacaaaaacagaatggattttaaaacaaactatgagacaggaaagcttagagtcagtcatccttcaaagaatgctaaaggcccacatcactaactcaacagcagacaagaacctctgaatgacttcacccagttctcactagtataagaagacaactctaattgccaaagtcctatttcccaaatggaacctcattttaacacgctttcttccaaagtgcaaaatactaaaaactgtatggaaatttcttatttgtatatatttctctaggaagagacagctacagctttcttcaaatgcttaaagagattctagcccctcaatattaacaagaacttccaattttacaatgactctaaagaaatgcaggaaagctaagaatctcaaaacaactatcattccctagtcccataaagagatgaaattagtcaagaaagtgtgtactaaaagctttcagtaaaaaaaaaaaaaaaaaaaaaaaaaaaaaggggataaaaatccatcttgaaggaatagtttattgctttgatatttataaaagatttttgtgatatcctattaacatagtctttaaagttgctgaaataatctccaataatgaacaacccacaaaaacaaaatgctggaagaaaagaacatttagaatataaatttccctttcatgataaactttttaagtcaaaggaaaaacccaaggattaaatctatcactacagatggtccccaatttatgatggttcaaacttacgatttttcaactgtatggtgatataaaagtaacacacgtttaggagaaactatattttgaattttgatcctttcccgggctagcagtctatggtaagagactctctcgatatagggcaatggtagcaagccacagctcccactcaggcaatggatcatgagagtgaaaaatggatactctgtgttgccagatgattttgcccaactataacataaatgttctgagcatgtttaaggtaggctagactaagctctgatattcagtaggttaggcgtattaaatacatttttaacttaatgccattttcaacttgcaatgggtttatcaggagcatctgtattagattggccaacggaaaaatatacaggtacatcaaactgtagataacatacctggttcaaaatataccagtgctaaagcaaaaccttcactgtgtcttaaaaaaaaaaacctatcattttactgttactgtcttacagtaagtataattttaaatttgtcaagttttttaaaatacatttttaaaagtgggaaaggggattttgcatgtcagaccttatctcctattcattttcagtcagaaactgatgtaatagatatcagtaatataaatatatactaagaaactgcaagtttatttaaaaaaaagacactgtaaggcattctataaactggtttagttttatccccattccacctattcttatgactttctgggttattttacctattttactcctcaaagcccccatccttctcttcataaagatttcttacaacgaaaacctgtatctgttgtcacacagaactattcagcaatattcaaaaaggtaccatgtcattaagcatatcaattcagttcacgcattgagagcctaactcaaagctctgagaaaagaatgctcgttgcaaaaatagttatttttattaagaccaatctctagaaacttaacattgatattaaagatgaagatgtctatgagaatgcatttagcacagcgttgctcacacaagagttaccttttgttttgttttgcacaatggaatacaagcttagagataaaaaaaattcttcccttgaaataaaaaattcttctagccttactaaaatgaaacatatgatacacatcacacaagctgaaagccaaatctgttaaatttactagtgaaaaatgtcctaagtaccccacaaaaatctaagattttattacgcaaactttgacttttaattcagactccaaaagttatcatttaaatcataataaaacacttatcttttaatatgtaaaagccttaaaataagcactgcctttcaagcttaagtgtcttctgtttccacttggcaaatttacgttatgtgaaatccttaaataattaactagcactataaaccgtctagtatctcgaaccaaataaatatacaataaatgttcttcccaaattagaacatacaaaagtgtggatttggcactgaactacaatatgtgggctctgtgcgtaaccagaaccggtgaagacttctacacctgtaaaatgaaaatggccaaagcaagaaaaaattttatgcattttatgtcctccatagtgaatttgatagtcaggtgtggcatcactagacataaagccttcaaacagttctataatatatcaacaaagcagcaatactgacagctaaatactaacaagtgggaaggcaactaaccaggaaaagctacgtaatctgtgggtcccagtgcaagatgaaaatgcagggtaaccttgtccaaaaattcttaagaatttcaagattgggtaggatgtgcaaccataccggttacaagctggaaaagcagtcctgcccataactaagtactcacgccaaaaataaaattaacctccccccacacacactcaaatgtggtagcttactatcatttttgacctgtccagctgagtagccaagaaacaaagagctgggggtagactgagatgggcaggttttccacagggtggcacaccatctagcccccttaaaatgtcaacaaaaaagtaaccaaaccaagctaagtaccacagattctagcctctctcaattccaaataaacattatgagtgataaaagtggcaataagaatgtgacgatgtgatagatttaataagacatcaaatgggagcgaaaatactgatgctaccatgcagacaagtcatcaaaaaggggaatggtaaagtcagtcttgataagaagcttaagaagctatttcagagtatctagtcctttggggaaaaagaacatgaaggctaatttgccactgtggtgctcttgtgcaatgccaataatgcctgaaaagcgtcacaggttttttaaaaaaatgtctttcagcaaagaaagaggaaaaggttgatcccagcttaaaagtcaggatattctggaaggctttgctgtgtccttaaagagaacctaagacttgcttctagaatagaagtggggtggcaggaggggaggcacattatttttaaaagataagcagggaaggctggaagagccaagagcggttggttacaaggattcagctagcagcatctgtctgtgtataaataatcaaaaggttgattcaaggaatgatggtatatgacactcacagcatcattctcccttaacctaccaggagctgagtcttaactaaaaccactgaaactgggacagaaaggctttgtttttctcttgtgaagaggcggtaaccagaacaaatcaaccaaaaaaactaaatcagagaggatctataaaaacacatcttaggcctagaaaagaaaaaaggttccatagtaaccttttgacactgagtgtcaaaagagtggtagacactgaccagcagtgggtacttgctctaaacaagaagcatatcctataactaaaattatcttgaaccacagggaaagtgtgtgagcactgaatatagctgacttgattgttcctgaaagaagacactacacaatgaaggaaacacctacagataaggaagagggaggggcttaacacctaaagttgtctttcaaaggaagaaaaaaacaactaactccctgaaaggtggcagcacaaagttacccaaataacaggcaacaaggggctggttttaaccacacaaaaataaaaatactctctcaaaaaggaaaattacaaaggaggaatcacagaaaatttaatgtaacatgtttcttcatattctaatttttcctaccccattctggcctttatcttccagatgttttcttcctcttctttctctccccatagtttgcaagcgaacttcccgtaagtatatcctccccacaaccttaagtgttgttaccttagcatccctacaaacctcctataaagaaggcccctaccacaaatgcagtaacattcgggtccactcagcaatacagtcaccatttatatatacccaaaggttactaagacaaggtagatgcaggacagcttttccacccgctcaccaaaatggaaactccaggtcagcttccacaagaaatgggaaattcaagcgactctggcgaaacgattcttgagaaaactcttcaagggcaacaaaacaatatttcaaacaaacagattttacttgagggaatggggacattacacagcaattgatattcgaatggttttaaatggactgattcgccgtaagttttgaggctgagctaaatttttatgaagaattattaggaatagggccactagaaaattaagttttaaaagcgcttttgtccttgccgaaggtattacattttggcacttctaagaaccgttctttgagggagggaataaaggagagtggacaactcgtagcaaatccttttcccatgttttcagaaaatgtagagacgataggacttgaaaatctttgtcataaagatggtctttaaaaatgcacacaattctaaatgaccatctgggcagctacaactgcatgctcatagctcgcatctagaggcatggttttacgctctggccctgaaggataacaaggaggcttttaaggaaatgccgtgagaaagactgctggctaagcattgtcacggccactggaggagcacctgccagtgaaccgacgctggctcccccagtctcaccagtgcacgcacactagtccgtgcaccccggccgccgctggcaggccctaccagccaagctggaggagcagctgccgcaaccacggcaagcgaactgaaatcccagagccggcctcgcccggcagagcgcccgcgcttcccgcgcagcgcacgcctcgcgcgcaaacccgagatgtgaccgcgagctgcgacctcgcgcggctgcgacgggcctcacctaacgcgcacgaggggatcatcattgctcctgccctgggcgcccgcggccctacaccacctccgcacacaacgcggccggtgttaagtctccaaacgccccgagagctccaaggaccgcgcgcgcgaaggcgccgtagcaagtgggcacacaccagacaccaccccggcgtgttccgcgggagaagccagtgcacacatcctcccgcaaggcggggttgccagtgcaacacaggaatcctgccctttttctagaaaagccccctcccccactttccctccaatacactcacctgcgtctcaacagtttccttcttgcgctacacgcggccgcacccgggcacgtccacgcccgtgcacgctgccaggcgcgactgtccccgctcggctcccgccgcccccaacctgcttgtgcccacgggaggggcggtgccacctcccgaggcgcccaattctctctactcccgccgcaacgggctgagctctaggaacttcgcgggcacaacctccgccgcccccaccagtgttcccgcccagagttcggactagggcgcaccacccctaccctgctagacgcagcgggggcgcgcacagaccttagcctcggcgtccaaaatggaccaggggcaaggcgcggacgccgtccccgcccccacgcccccagcacttgcctgctgtgactcgaagctgcagctactacggctcgtgccgctggccgtcagcactgccgcggaggagtcgctcggggcgagctccgcggagaggcggtggcggcggcggcggcgggaaaggggactggaagccggcggaacccccgccccacccgcgccgcgccgcgccgcgccggcaaccgccctcctcacccggccggctactgcctcagtgacgcccaggcgccgcggtcccgccgtttgtagcggggcgggaaggaggggcttgcttggaagagcgccaggaggcggggccggcggcgagttcgcggcgccgcggccgccgccggcgcgtgccctgcccgaccgcccttcgggtccgtgccggcagggagatgccgggcttcagcagctcagctccgtccctccggacttccgagtctcaccaggcttccccgacaaggtttctctggactcggtggagagcgttgagcgcccagaggaggctgattccaggtgcaagtttgcaaatcccgaggcccggggcgctaacggggagtcagagcagctaacgtgggggttactttatgtgttcataaatgtatttataaatatatataagtatacacacatatgtgtgtctcttttaaaaattctctttttccccctacttcgcagccaaggggtcctgtccctggacagaaaataaaggcttagccccctgctgcccctccctgcctctctagagagaacctgacgtttaaataagcccagagtacctgtgcggggtgctgtactctgcttcaaacgcaaagtaggaaatcctgcactcgactatgcaaacgcttgccgctagccgcatccttctatcgccccccaactcaagacccgaaatggccaactcttcaccgagggggcgtcccatcgctgccttgccttggcccgccccttcgccaagctcaatcccttttccccagaaaaacctgtgcctgtcctcagacccggccccacggctggaagtcaaaacccaccccggagccacgcggctggagcacgtttttacacctgctcggccgcttaattacgagagcacctgtagttgggatttttttcattgcaaaggcatcgattttagcccttctcctaaaatactacatttaaaaaatcacctgtcatacctacctgaaattgtaggaggtaagagaaaggaaccgagcagtgggcgacccagtcgccgcaagaacgtgaccgaggttacagcttcaagggcatgatgcaggtttgatgcagcaaggtccgctaagggcgtccagcgctccccgcccccatgcgacgggcggagcggggttggggggaagggaggggactcgtctaacccagggcgggtgtgggagaggcaaatttgccctcttgggcgaagtctaatcagcatagtgaagtagggggctcaaccaaggtcaaaagcgagataggccatcccttaatttgtgcgacccagtctggggacaccggatacagctaactgattctatatcagcatttccgtgtcaccccaaatccgatttgcaattaaatgaccttaattgactttgtgtgggttcctgggaaaactgctcaaagcgcctgcgcctctttgacctctcagtaaatagttaattataatattctcatcccaggcacgcgggattgctaaaaatgcctatttccaaaacgttaggcgaaaatgggcctacttaatttgtcaatccaaacctaaaactcttagaatgccctacgccctacttcctgacgctgactaaattatgggagagctctcagaagagttccccaagtcttccaaaccacttcttcctacaaccgtagcgttttttgtgaagagctccagaacaggttagctttatgaagcggggtgcccaagcacttggttaaaagagggaacggggaagaagtgcctgctgtaagacacattcaggcaatgacagcaataagtaagggcgagagttaaaaaataaaatgttaaccccataacaacttcgaaactctcaacatatttttttgcgggcttatctgttcatagtctgacaaatctttcagatgtcccatttaagaagccattttacaaggaagtcttaaggcccaaacacatttcctacccttctgttccccaaaacacgaacaccctttttctgacctttagaaactgattttcaatttggaaaataatttctttagttactattgtctgctgtgtactttctaaaaattttcattgtaagtctacgttttataggttgcagttaatagtgtaggcctgggaaataaaacattaatctccctcccacccccagaggatgggtataataaataggggtgcggagaacggctgaaggtttagaatcttaaccaactggagtgtttgtacatgagagggggaagggacagaatccgtgcatttcggggagaaagtacagagacctccatccctgtccagcagtgttaacagtaaatactaaatggttggctatttctctcaccctcgccataataaaaccagacctgcagccggtaattacgagaaaatacccagtctcgccatcagttttgctaaccggtacttgaaaatgggaaacggggaacttatccaacctccaatttgtcacagttgtatagctttcgtattaattctgtacagacgtgaaataggtgggtacgtagcaacgtgctgggcataaattaagcaacaatggccacgcgaggtctcgtccgccgcggagctccagtggtgggcactgccaccttgccatccctagcccccaccgcccttcgcagagtccagtccgggaggctgacggtgcgctggctttcccagccggtagagtgggtggggtgaggagcaacgagacgttaaccccagccggctttgtagctttttcccatcctctgcctctcgagcaccacatgagcgctctcacgcacacactcacccacaccccctcgtgccaataatttaaacttctcttaggaaagccagcagcttgttccaccaccaccaccccttccgccctccccggcccacgaacatcctccccctttcccacatctaccctggatcctctctttggcagtagaaagccaaatgatttctcctaaaccctgagaaatcacaaaagttaaaatgaagcgtgtgcctatctgcccagcttgtcatccccaaccatctttctcctggcgtcaatttaacaatagctattcgaggaagtgggggcggtaaggagggggtgagggctacgtggccgagttggctcctggggtggctgcgaagcctcgcggctgcagaggggttccccctctccccgaaggcgaagtcagccgcgtaggaccaaggacagggcttggaatccacttcccagcgcccagcacagcgaggctcccaagcagccggcacttcatagacacagctccaaggatcttatttacgcttttctgaacaaagggaatctcatatccggtacaggcttaagaattcagccccaaattggctatcttcttttaaaactgaattatgataattggagtccgtgaatcagagcccgcatacaatgatgagttctgacagcttctaacaaccctagcctcagcccagccccagccccagccctcaggcggcatgtacttttttcagtcaactacaactcgctgcctggtgcagcatctaaattccatctggcaatcccatctccccagcacatgctatctggttaatgcaattaagcctgtggttttcgctggtctaatctgccagtccaggcttctgattccccttaatgattgtaaagcctctcccgtccttccgttgctgagccaaagtagaggcatgcatccccaacacccaagttatcactctctccccacgaaatgaacttccgatctcaatcttgaagctcactccacatctaacctcccattgtacccctactcccccctggccacatttaccacttaagtttctgccatggacatttacgaatattcagtacgctaagcatgcgtccaccgtcttttagtctagctctttaaaattaaaaaagcagaacagtagctttgaaatgagacaaacatgtgcaattaacttcatattctgtattccgctcacttacaggttttctgggtttgccagcgcatcgctgcaactaatgattaaagaaaccaaaccgaaacttacctttctcccttaaggtttttgtgtatgtgtgtttttaaagtaacggtgcagttctcccaataaggatgagcaagaagctgctggatagttctcttaagacagcacgaaacctaaactgtgctcggcttaaaagaagcaaataaaaagaaacgctttcgaccccaaagtccaatgctaaaagaaatggcgaaaaaaaatatgaaaggggaggggaaacttaaaaaagagtttaaaaagacggagagactaccctcctattgccgttcaactaaacaaaaaggggcaagaaaaacaaaccaaggaacaaagaaaagagacgaaagaacgttttttcaaaaagacgatgtctttctccttgttgctttttagtaggtcgctacaggagtaagctgctgcatctctaactaagaacagaaataggggggaggacgtcttaaaagggaggtggactggaccacagatttatagcaccgtatcaccaaccccttctctgcctccgcactgccgtgtgtgcagctgctctgccaggctcctatcccgggcagcacgcgcggaagtatacgccgaatcgcgccacaacgtaacttgctcatcgccccaggatcctgattggtccacacgcttccattgaggccgcccaggcggggccgcgtgagacgattggctatgggcttgtgtcactctcgagagctcaatggagtcccgtttcaaggtaagttgtgcggggaggtacactcttaacactggcggcgaagggaaatgcaagaagcaaaaagaaatgtggagagagcaacgtgggagggttggaactgtactatcagagtttgcgatatggcacgatctcctttcctcttaaatctttctgcttcagaaagattcatttcctttgccatcactgctgcatctgtggcatatttctttataacatttaactctgtccggtatgtatgagtcattgagagctccctctctttgatctgagtgaaagggatgaatgtacatccattatttgcccgcatgccttttttcgatttgtgttcagtactgtattttgtattagatgttaggtaattgtatgtctttattttaatatacgcatatttcagatttatgtgtccccatgaacccctttttaaagcatccttttaagataaagatgaagtcagaaatgctctcaaataaagctgcacggtttgaattggctttcacttcatgttagaatagaaaagtgtaggataaatatcctatccagaaaaagaggtattgagtagagctaaggtccttcacttcgaggtgtctaatgattctcaaaaagagcagctgtatataaaactggaacaagccactcctctgcatttgcagacaggtacagtccttggaccacacatgtattgctgacagcaaagatagttgaacctttatcagggctctttctgtgaggatttaagaagtttaaccagaagaccaagtgctatcaatgcttctgcttcatagaggaagactactttattacaaccccatattttaacagcattcaggagaccaaaatacagttttatgcatgataattgtttcttcctctaagtgaaagtgaggtcctcaggatcgtctggatgtataagtagacacaatattcatttgacctacgttcttttccagccagcatttctcttttcaatcttgaaagatagcaccaacttcctagacagtttttaccattcttaccagaatgtgtaaatgtaatgtacacattacattacacatgtaatgtgtcttaaccagaggcacatgcctttttgaaagggattcctttacatatttacaactagtcgctatctttgagaatgccggaaaaagaagacacaggtaagagttagagattgcaaaagggtagggtgtcatggaggggaatgggacagaagatcccaaagcaaaatgactttgaagtgaggaatacagtaaatcagtgttctttgagagtgtccttgagtgttgataaatgattaatggtgaaaaacagacctgtttatctcccgtgtagcctgtataacaatatacgagttctgttactttgcatgacaatacctggggcttgagaaagaaggcctgaatctatgttatcttataattagtgtttataaaatcatgccttaacctccacccccagtttttgtataacaacctctggagtcttaatttcaacttaaaactattctctagacctgggtgaaactcacagcaagaagaaagaaaagcactttgaagaaatggagtcaagggggaaaaggaagactccaccccatctagactagatgtatgaataacagaagattgggtttgtagtcatcttccttcaacccctccccttgtccccagctccatacagagaaataacctttaaatgaatacaatttggggaaagtataatactgtttgatttcatcagacttacctaggcagtgaattgtctttcctcctttttaccatgctcgtaggttaatattgaattagttgcatatgcccatataatttcagtacattgaagtaaatctttaccattataattatataagtgccttctaactaggtggaaactaatactttttttggtgcatgtttatatccacaaaaaaagacttgtagataactgtgatatctgtagataacccaaaatgatagggacaggtgtgaaaagctgggagtgatatggagtaataaaaatctagcatgtgtattatgtaaagaaattacatggaaaatagtaaacttgttcattcaaatgaaaaatgctaaattctgtagattcagtatttatggttttttttcagcttgggcatagtgacaaaatattattcaaagtattgtcatccctaacatgttgtctttttatgtaggtgagatggacttaaattatttaaaaagtgaaagtatcttaaaatattattttacttcctcattaaaacagatgtttttacattttaaaacttttaaatggatagatgtattataagcaacatgtactttttcaacttttaaaaataaaaaatattgattacagcctctttaaaacaagtgatatctggatgtagatttcactttgaaattcatgtctcatagcttgaaacattaacaaatacatactatcctatgattaattaatgaagcctatgtgcaaacatctcacttaagaataagcaaaaaatgcaatcaaccccttttcactcatagtttggtaaaagaattatccacaacatctgaatttgcattagaaagtatttaaaagacatttgaatatgattaagttatatgaactctgacatatcttccaagttcctggcattattttgaattgcagcagaaaagggagagatgaagggaatgactgcgaacttggagcaaaagtgtgaggtggataaagttgcaaaagaatagttctcaaaaccgaaaaagtcatgaatttaattattttactgaagtttctatataagagaacatttattcataagaatatgcaaagctgttgtggaaaatgtcttttaggataaataactcccttacactagaggtcctgggagcaagggaaggagtgattttacattttgtaataaaagttactgtaaactacttgtaacgttttgtaagtaaataaagaagttaaactattaaaattagtttacaatgtttggcttaaggcagtaatttccaacagtaaaccttcttagatgaataaaaatgttatgtgttagtatggtggagtagggggttatggttcatactattggaaatatgatagtttaatgtctgcatgagaaatacagatatcatatatcttgctgattactcttttatttattcttcctaaagtagtatgtggacttgcctttcaccgaaaggggggaaaagttgtgaaaattgacaccagtgtgaatttataccgtggcaaccacgcaagagaaagaggcaggaattagcaccatggacagagacgagcagccctcaaattaagatttgcaaagcttgagacggtgttttctgtccctttctgtgagacacggaaactgcgtgtcttgggaatgttttattccacgggactttgcggaaaagactgtcctactccacagaaactcatttattttgaattaggctggcatttcttaggactcagccatcatgacaaactgtcaggagacttagagccccgaactcgctgtgcaccttccactgtcctgttttacatacactcccttgccggcgtgagctcgcctttcttcagagtgttcatgaaaaataaatgcaaatccaggtagtcttcgaaaagtctggtaaacctgctccagagtttttaatcctcgaatatcccagctggaattgcagcaaaaatgcctgcctgctcacccttgctccctccccccgttcttctccctgctccctccaccccctagcaaaggggtaaagccttttactggaaggtgagtgactcccaagactattttgcgaaagattctttacattgcaaacactttcgttagggacagtgccaggggcggcagtgagcgggatctcaaacatcctttactttctctttacattgtgtctgtaaactcctgttcaagggggaaagactgtaaagtaagagagcacactcaaggaatattccccccgaatcctgaggttgctgtttacacttaaagacacatgaattgttcatttaaatgttcttttaaaaaatgtaactagtgtcgcggtaaatctttgagaccagcctaggttggttctcccttcccagccccccacttacacacacacacacacacacacaccttttttttttttttcctggaccaatgtatgaggttcattctcctttagatgatttgcctgcagatattcagactaagatctgttgcacatgtcccagagtgtctaggaaaatatatttgcagcctcagatcgacgattattttatgtagacgctcccacaaatgtccccagatttccttcccctcttttactcaatagcaacttttaggaggataaactcacgtttttcctgagcataaaaagggaaaatctaggcgactaggcgagggtgaaggaaaaaaaaccccaaaaaacccggaggtgaaaaagggcaaatcagagacttatgtccgtttctttcagggatactaacagccttctttaagcttccccctggagccgatacatctcatgcaaaattaatacaagcaattaaaaataacagtttccaaagttaaaggaaaccatctgtctcagctgatagtaatcagtcttttctctggcccctttaccgggacctgggaagaaacggtttttatgcttccgatgctcggaggctctttcttatattgaagatttatgtttccacttgtgtgcgatgcacgtctaatttgaaataataaaaccgggctgagcaaccagtcaatcagagccatccagggcgctccgcacgccgccctgccccccacctccctccggtctctaactctttccctcctcctccccctctcactctcctggccctccccgtcttccttcctccctcctcggctctcacacgcgctcacacttttacccccacgtgtgttcagatcaaacccttgtcccacagagcaagtgccggcaccgggccacggtgacaaaggcggagtttgtatcagaagaagactgaggcccggggagacacagcggctagagaaacagctgtcttatcagcccgctgcagagatggagatggcttgagaggtcctcaacagataatcacttgaataggtttgcaatgcgccaaacttcacgcttgataaggccaacccaatgtagagagaagcccagatcctgctccattctatctgggctgtaaattaagaaattgaaattcaggtggcagaggcagcagtctgctgatagaccgctgaagtaaactgcattaaaatgctttcggcaggcagagggggcgcctggaatggaatattgtttaaaaaaaaaaaatgtagtgggagggggcagtgagagagaagaaaaagcccacggggcttaaaaattatttggggaagggaagctgtgaggagaagtggaaaagggacacagcatctggccatgattcctaatcatagctactatgaataaacaatttgaaaagtacagtatggagttgtgtaaagtttggtgtgataagagatcaaggaacaatttaaaccaatctggtataaaagggaattccgtctttatctgagcaggggtgagaggaagtggatatcaaatggactgtaaagttttcctttcattgtaagaaaagcagatcaaccggatacagaggagttaccataaattgaagttaacctggccttttggctgaagtgatagggccacgggagagattccagaatgatttttagaatagcctaagaagttgtcatccacaggaaagaatctacatagctacttacaggaataacagttatttttcaactccctcctccctttacccaggtaattactataggataatacaggaaacaaaaaaaaatcccaggtatgtactctaacacatacctgattcttaccgcacactttatatctacatttttctgtctgctcttttggatatgaggtttgaaattttatgcattatttaaatagatttttttcacaaatatttaatatatgtaatgaccagcatatagccagtgacactgtcatcttgattcactaatgtcttagtgttgtaccttgttctttgtgtcttaagtgaattgcaagttcgttggtgtccatttatgaggtggatagcaagtatgagaagatacatggcattttccacaagggcatttacattttaagtcttagaaacatttataaaaagttaccttcagccgacaacacatagttaatacagctttagaaaatgaatcaatttttattttgtttaacttcaaaaatgtgatcgatctcagaatgcatttaactgacaatataaaggcttatatcactttaggataagcaaaaataaaaaatgaacttgttggaaaaagtgagaaaaattttaacatgctatcataaattttagcaactattaaactacttgaattaaaaacaattataaacttggaaattgttatttgattattcataggttagtaagcaaataaatataggtcatgaaatctcaaagacatttctgttgaattgttacatgcaaaaatccttcatatctaacaaaaaaagaggtgtttgcgttttttttattcttttaaatttaagtgtatggatgaattagtgctttgtgtatcctttaatgagagagaaatttatggttatgtaagctaacttttcctttccataccattattttccataaagttatattggtttaaataatggctactatatatgtatattaagaaatattattttaatgaattc

SEQ ID NO: 58664 - DNA, 598 bp, Homo Sapiens
gactcttcaatgaaaatgtatttcacattaaacacaaggtacatatcatgcaaatgaggcatcaccatggtcacaatggtgctgtgaggtacaacaaatcacaagaaaacagacatttagcaaaataaggttccaggaaagatgagaggcattttctgaaagccagaccatgctatggtttctgtgtgcctgtcataaagggacttggccagtatttgccgagatggacagcaccgcattatgtggaggcatgtactttattgagtagagacacatacacagacatataatttctgtaactaatacattcttaaatgtagctggctgtaaaagcacatgaacaagattactactgagacttctttgtatctcctggttgcaaacctctctcagaattatgaatctttccaaacccttaattatacaagtcaaaacaaaaagtttcaaagaagaaaaggtcattttaatttgaaagccacatttcgccacaagaaacaaaattaagaaaacacaccattatatggcataaaatgtgtggagtatacattctagtgtcatttttcccattcagattttttcttgaagtccattaaagtga

SEQ ID NO: 58665 - DNA, 2151 bp, Homo Sapiens
gaggcctgaggcggcggcgcgaggcagtatggtttgaagtggtgaacatggatttttctcggcttcacatgtacagtcctccccagtgtgtgccggagaacacgggctacacgtatgcgctcagttccagctattcttcagatgctctggattttgagacggagcacaaattggaccctgtatttgattctccacggatgtcccgccgtagtttgcgcctggccacgacagcatgcaccctgggggatggtgaggctgtgggtgccgacagcggcaccagcagcgctgtctccctgaagaaccgagcggccagaacaacaaaacagcgcagaagcacaaacaaatcagcttttagtatcaaccacgtgtcaaggcaggtcacgtcctctggcgtcagctacggcggcactgtcagcctgcaggatgctgtgactcgacggcctcctgtattggacgagtcttggattcgtgaacagaccacagtggaccacttctggggtcttgatgatgatggtgatcttaaaggtggaaataaagctgccattcagggaaacggggatgtgggagccgccgccgccaccgcgcacaacggcttctcctgcagcaactgcagcatgctgtccgagcgcaaggacgtgctcacggcgcaccccgcggcccccgggcccgtgtcgagagtttattctagggacaggaatcaaaaatgcggtgcgtctttctacgtgaataggattttgtggctggccagatacactgcatcatctttttcatcatttttagttcaactttttcaagtggttttaatgaagctcagttatgaatcagaaaattacaaattgaaaactcatgaatcaaaagattgtgaatccgaaagctataagtcaaaaagccatgaatcaaaagctcatgccagttactatgggagaatgaatgtgagagaggttctcagagaggatggccacctcagtgtaaatggggaagcgctgtgtaagtatggcttcgttttcctgtgggcgtcggtcgtggagttggtcccacacgctgtcatgttgggtactagcagtagagaatgaacggcccgtgtgacatggtggtcctcactgatgacgacgggctgttggagctgctgcttaagccctcaccacagaagctcatagccaccagatcgcatttgctttgattgttgactgtctcgtgtgtaattgagtttcccagtttctacagactgccattgctatgcacggctgagatggacagagtttgcttgtgaatccgccacactcactgcctgtcaccacacctgcaggcgacgactgtaagggcaagagacacctcgacgcgcacacagccgcccactcgcagtcgccacggctgcccggtcgggcagggaccctctggcacatctgggcatgtgcaggttgtctctcgccccgtctccgtctcatctcgccctgtcaccatgctatttgtgtcttgtgtggtttgtgcttggaattcaagtgctttaaagtcttgctgtaaaaactgacaggaatagtattaactttggtttaaaacagggtgaatctctctcgaaaagctcccttgtaaatattttttggaagcggagtctcactctgttgcccaggctggagtgcagtggtgcaatcttggctcactgcagcctccacctccagagttcaagcaattctcctgccacagcctcctgagtagctgggactacaggcgcacaccaccacacccagataatttttttgtatttttagtagagacagggtttcactgtgttggccaggacggtctcgatttcctgacctagtgatctgcctgcctcggcctcccaaagtgctgttggcatcttaaaaaaaaagttagtttcaaaaataattgtctcacctgctaatgaataaacataaagccattgatttttcttttaaattctcataagccatatttctttgcatgtcaaccatgttgtaattacatagttgcaggaattcacaagcaggtgttaagtcactgtgaggagacagccacccacagtgagaactggaacaaaacttactttgggaggctgaggcgggtggatcacttgaggccgggagttcaagaccagcctggccaatgtagcaaaaccctgtctcttaaatt

SEQ ID NO: 58666 - DNA, 2130 bp, Homo Sapiens
gttagagaacgtcgcggaggaggtaagcgtcgcttggcgcctggccgccgcgggcaggatacaccgtgggcctgaggcgcgagcccggcggcgtgcggccctctctccgcgcggagccgagccggaactgcggcagtctctccctgccaggctcttcatccaaggtttctgtggatcccttctgaagttctatctgaaaattgcgcttaagtgaattttctgttagaagaacttggttgctactttcttgtcaagatgattgcaacacctttgaaacattcaagaatttacttacctccagaggcatcttctcaaaggagaaatctacccatggatgcaatcttttttgacagcattccttcaggcacacttactcctgtaaaagatttggtgaaatatcagaactcctccttaaaattgaatgaccataaaaagaatcagttcctaaaaatgacaacttttaacaataaaaatatatttcaatcaactatgctaacagaggctactacctctaacagttctcttgatatcagtgctataaagcccaacaaggatggattaaaaaataaagcaaactatgaatcaccaggaaaaatatttctaagaatgaaagaaaaagtactgcgtgacaagcaagaacagccatcaagaaacagtagtttgttggaaccacagaaaagtggaaataatgaaaccttcactcctaacagagttgaaaaaaaaaattgcagcatacctacctatgtgaagaaaaggaaaacaacaaatcattccagtcagatgacagttcactaagagcctcagtccaaggagttcctctagaatcatcaaataatgatattttcctcccggtcaaacaaaagattcagtgccagcaggaaaagaaagcaccactgcacaatttaacttacgaacttccaactctgaaccaagaacaggaaaattttttggctgtagaagcccgaaacaagacattaactagagctcagttggctaaacaaatttttcactcaaaggagagtatagttgcaaccactaaatccaaaaaggacacgtttgttttagaaagcgttgattctgctgatgaacaatttcaaaatactaatgctgagactctcagtactaattgtattcctattaaaaatggcagcctgttaatggtttctgatagtgagaggacaacagaagggacttcgcaacagaaagttaaggaaggaaatggaaaaacagtgcctggagagacaggtcttccaggttccatgaaagatacatgtaaaattgtacttgcaacaccaagacttcatataacaatacctcggaggtcaaaaagaaatatttcaaagctttctcctccaagaatatttcaaactgttacaaatggacttaaaaaaaatcaggtagttcagctacaggaatggatgatttaaagcatcaataataatactgctatatgtgtagaaggaaaattgatagacgtcactaacatatattggcacagtaatgtaattatagagcggattgagcacaacaaacttaggactatatcaggcaacgtttatatattaaaaggcatgatagaccaaatttccatgaaagaagcaggatatccaaattatctcataaggaaatttatgtttggatttccagaaaattggaaagagcacattgataactttctggaacaattaagagatggggtttcgtcatgttggccagactggtctcgaactcctggctacaagtgatccgcctgtctcagcctcccaaagtgttgggattacaggcatgagccactgtgcctggcctgagggctggtgaaaagaacagggaaaagaccaaacaaaaacagaaaactggaagatctgtccgtgacataaggaaatcaatgaaaaatgatgcacgagaaaaccaaacagatactgctcaaagagccaccaccacttacgattttgattgtgataatttggaactgaagagtaataagcacagtgagtcaccaggagctacagaattaaacatgtgccacagtaattgccaaaataaaccaacattaaggttcccagatgaccaagtaaataatactattcaaaatggaggaggagatgacttatctaatcaggaattaattgg

SEQ ID NO: 58667 - DNA, 431 bp, Homo Sapiens
ttttcaaggcaatcaagaataatttattatggccttgctaatacaaggttccaaaaaatgactggttttgatataacgtcatggtggctaggtaaaaacatacatgttccagaaatgcacactcaagtgtgcaggagtacaatcacacgctcgggatctgctttcaaattcctcagcagagaaaaaaggggaaaaaaatgttctcacaatcagtaattgctgaaggtccactctgcacccccactgcaacaggcaccagaggaacagcggtcagtcttgggcacgttgcacgtcgctgttcactagcagccttggtactcttctccttggcaattcccagatacagtggagaggtcggtaggacacaggagctggctggcaccgagaggctctgccccatgctggggcactgctgagccctgactagcgcg

SEQ ID NO: 58668 - DNA, 2540 bp, Homo Sapiens
gaaaaggtggacaagtcctattttcaagagaagatgacttttaacagttttgaaggatctaaaacttgtgtacctgcagacatcaataaggaagaagaatttgtagaagagtttaatagattaaaaacttttgctaattttccaagtggtagtcctgtttcagcatcaacactggcacgagcagggtttctttatactggtgaaggagataccgtgcggtgctttagttgtcatgcagctgtagatagatggcaatatggagactcagcagttggaagacacaggaaagtatccccaaattgcagatttatcaacggcttttatcttgaaaatagtgccacgcagtctacaaattctggtatccagaatggtcagtacaaagttgaaaactatctgggaagcagagatcattttgccttagacaggccatctgagacacatgcagactatcttttgagaactgggcaggttgtagatatatcagacaccatatacccgaggaaccctgccatgtattgtgaagaagctagattaaagtcctttcagaactggccagactatgctcacctaaccccaagagagttagcaagtgctggactctactacacaggtattggtgaccaagtgcagtgcttttgttgtggtggaaaactgaaaaattgggaaccttgtgatcgtgcctggtcagaacacaggcgacactttcctaattgcttctttgttttgggccggaatcttaatattcgaagtgaatctgatgctgtgagttctgataggaatttcccaaattcaacaaatcttccaagaaatccatccatggcagattatgaagcacggatctttacttttgggacatggatatactcagttaacaaggagcagcttgcaagagctggattttatgctttaggtgaaggtgataaagtaaagtgctttcactgtggaggagggctaactgattggaagcccagtgaagacccttgggaacaacatgctaaatggtatccagggtgcaaatatctgttagaacagaagggacaagaatatataaacaatattcatttaactcattcacttgaggagtgtctggtaagaactactgagaaaacaccatcactaactagaagaattgatgataccatcttccaaaatcctatggtacaagaagctatacgaatggggttcagtttcaaggacattaagaaaataatggaggaaaaaattcagatatctgggagcaactataaatcacttgaggttctggttgcagatctagtgaatgctcagaaagacagtatgcaagatgagtcaagtcagacttcattacagaaagagattagtactgaagagcagctaaggcgcctgcaagaggagaagctttgcaaaatctgtatggatagaaatattgctatcgtttttgttccttgtggacatctagtcacttgtaaacaatgtgctgaagcagttgacaagtgtcccatgtgctacacagtcattactttcaagcaaaaaatttttatgtcttaatctaactctatagtaggcatgttatgttgttcttattaccctgattgaatgtgtgatgtgaactgactttaagtaatcaggattgaattccattagcatttgctaccaagtaggaaaaaaaatgtacatggcagtgttttagttggcaatataatctttgaatttcttgatttttcagggtattagctgtattatccattttttttactgttatttaattgaaaccatagactaagaataagaagcatcatactataactgaacacaatgtgtattcatagtatactgatttaatttctaagtgtaagtgaattaatcatctggattttttattcttttcagataggcttaacaaatggagctttctgtatataaatgtggagattagagttaatctccccaatcacataatttgttttgtgtgaaaaaggaataaattgttccatgctggtggaaagatagagattgtttttagaggttggttgttgtgttttaggattctgtccattttcttgtaaagggataaacacggacgtgtgcgaaatatgtttgtaaagtgatttgccattgttgaaagcgtatttaatgatagaatactatcgagccaacatgtactgacatggaaagatgtcagagatatgttaagtgtaaaatgcaagtggcgggacactatgtatagtctgagccagatcaaagtatgtatgttgttaatatgcatagaacgagagatttggaaagatatacaccaaactgttaaatgtggtttctcttcggggagggggggattgggggaggggccccagaggggttttagaggggccttttcactttcgacttttttcattttgttctgttcggattttttataagtatgtagaccccgaagggttttatgggaactaacatcagtaacctaacccccgtgactatcctgtgctcttcctagggagctgtgttgtttcccacccaccacccttccctctgaacaaatgcctgagtgctggggcactttg

SEQ ID NO: 58669 - DNA, 2757 bp, Homo Sapiens
attgtaaactagtttttggtttgcaaaaaaaaaaaaaaaaaaaaaaaaaaaaaaaaaaaaaaaaaaaaaaaaggtcttttgtaactgacttctttcacttagcaaatggaagggtttttgatggaatcttagctcagatgtcgccctaggcttggccttctggaactcactgttctcttgcttccttccaccctgcctccctacccgctttgctacaagaagacagaatgtagaaacccccagttgactttttgagtagaaatgagccatgttctatttagtggtagaatgtttgctgggttagcccaggacttcagatggagtgcttcctcctttttaataccttgtgactgctgtgttggcaagcagagggttaaatgctgcaggaggacatgggagagtttttgctttgagggtccactggagcaagagaagcttgagagtctgtctctgagatcccagaacagacatgaagatatggtaccgattcccttggtgctaaaaggaactccaggggaatttcaggaaacccctccttttctcgtctttattctcaccccgtccccccgccacctctctccccaagttcacactcaggagggaggaatcttttaccttttccgttctgggcagcagcctgtagggaatgttatcagtgttgggactgggcacgggaccaagccttcctggtgcctggactgcaacctagctgagagctgacatggcagggcgagttgtgtgtgagttggctgcccctaggctcataggcctagcacaatagagaccctgtcaatggagggacactatcaggcaggtcactatcaatgtgacagacactatcaggcaggtcacattggtgcagatccttggaggactcccccccaccccccatgagtggattcctccaggtcaggggctggctgggactgtggatgctggagtaagtggaattgtgggtgcactctgcttcagcagtactctccaaggagaatgattgttttaataaattactgttttaataagggaggtggaagagctttttaatcacttgctttttaaaaatttttaattttattttaattaattagtttatttattttttgagacggagtcttgctctgtcgcccaggctggagtgcagtggcacgatctcggctcactgcacctctgcctcctggattcacaccattctcctgcctcagcctccagagtagctgggactacaggcacccgccaccacgcccgactaattttttgtatttttagcagagacggggtttcaccgtgttagccaggatggtgtagatctcctgaccttgtgatcctcccgcctcagccttccaaagggagggattactggcgtgagtcaccgcgcctggcctttattttttatttcttttgagatggagttttgctctgtcacccaggctggagtaccggtggtgggatctcgcctcactgcaacttgcgcctcccgggttcaagcgattctccagcctcagcctcctgagtagctgggattacaggcgtgtgccaccgcctccagctaatttttgtatttttagtagagaccgggcttcaccatgttggccaggctggtctcgaactcctgacctcaggtgagcgtcctgccttggcctcccaaagtgctgggattacaggcgtgagccactacacccagccaatcagttgcttttaaactacttaaataaaaagagccaacccaaaatcttgtgcatgcttgggaaactggcagtggaatatgagaagtttttatttgtggtgcacacaggtgactcgggctgttgtgtattggttcttgcctcgatctgtagcaagcaatctgttgtttcttgcctgccttttgggaagaaatgaaaaaagaagcagcacgagtctccatacatcatgattgtgatggcactgggcctgagaccttttctgctgtccaggtaaaaatgtgaagaccatggttttgaggtttcttaataaattcaggtgttaagtgccaagtgatgctcccagcccctgagctagagcaactatgctgttcatgtccccaggaatggaagtggaccctagttaggtgctggtggccagccatgtgtacctagggcagggccaggtcctgtgtgtgtgtgtgtgtgtgtgtgtgtgtgtgtgtgtgtgtgagagagagagagagagagagagagagacagagagagagatagagagaaacataaaggtgatcggcactcagacatcctgtgtggtccacctcacttctcaagcaggtgtctttccagtctacaactcgttgaccacaggtggaattcataagctctgttccctgtcctgcttgggtcctccagagaaagaaatgttgaattatcatcttggtgatggtcaactctgaaagcctaaattttcatgatcaccaaagtgtttggatttaaaagggtggctcactccgtaattccggcactttgggaggctgaggcagaaggatcacttgagcccagaagtttcagactaggctgggcaacaaagcaagacccggtctctcccaaaaaaaaaaaaaaaaaaaaaaaaaaaaaatcaaaaaaattagctgggggtggtggtgtgctcctatagctccagctactcaggaggctgaggcgggaggatcgcttgagcccaggggtttgcggctgcagtgagctgtgattgcaccactgcactccagcctgggcgactgtgagaccccgtctttaagaaaaaaaaaaaaaaaaa

SEQ ID NO: 58670 - DNA, 1817 bp, Homo Sapiens
gatcaatggtattttagctgaagctatggaatgttttttgcagtatgtttatactggaaaggtgaagatcactacagagaatgtacagtatctctttgagacatcaagcctctttcagattagtgttctccgtgatgcatgtgccaagttcttggaggagcaacttgatccttgtaattgcttaggaatccagcgctttgctgatacccattcactcaaaacactcttcacaaaatgcaaaaattttgcgttacagacttttgaggatgtatcccagcacgaagaatttcttgagcttgacaaagatgaacttattgattatatttgtagtgatgaacttgttattggtaaagaggagatggtttttgaagccgtcatgcgttgggtctatcgtgccgttgatctgagaagaccactgttacacgagctcctgacacatgtgagactccctctgttgcatcccaactactttgttcaaacagttgaagtggaccaattgatccagaattctcctgagtgttatcagttgttgcatgaagcaagacggtaccacatacttgggaatgaaatgatgtccccaaggactaggccacgcaggtccactggctattctgaggtgatagttgtcgttggaggatgtgagcgagttggaggatttaatcttccatacactgagtgctacgatcctgtaacaggagaatggaagtctttggctaagcttccagaatttaccaaatcagagtatgcagtctgtgctctaaggaatgacattcttgtttcaggtggaagaatcaacagccgtgatgtctggatttataactcacagttaaatatttggatcagagttgcctctctcaataaaggcagatggcgtcacaaaatggctgtcctccttggtaaagtatatgttgtcggtggctatgatgggcaaaacagacttagcagcgtagaatgttatgattccttttcaaatcgatggactgaagttgctccccttaaggaagccgtgagttctcctgcagtgactagctgtgtaggcaaactgtttgtgattggtggaggacctgatgataatacttgttctgataaggttcaatcttatgatccagaaaccaattcttggctacttcgtgcagctatccgaattgccaaaaggtgtataacagctgtatccctaaacaacctgatctatgttgccggtggactgaccaaggcaatatactgttacgatccagttgaagattactggatgcacgtacagaatacattcagccgtcaggtaataacatgaagcagtacaaaagaaaaataaatctaagagggaccaagtacataatcattattaatacactggaatttcaattttaaaatatttcaggctgggcgtggtggctcacgcctgtggtcccagcactttgggaggccgaggtggatagatcacttgaggtcaggagttcaagaccagcctggctaatatggtgaaaccccgtctctactaaaaaattatggccaggcgtggtggttcatgcctgtaatcccagcactttgggaggctgaggcaggccaatcacctgaggtcgggagttcgagaccagcctgaccaacatggagaaaccccgtctctgctaaaaatacaaaattagctgggcgtggtggcgcattgcctgtaatcccagctactagggaggctgcggcaggagaattgcttgaacccgggaggtggaggtcgcggtgagccgagatcgagccattgcactccagcctggacagcaggagcgaaactccgtctcaaaaataaataaaaaaaaaaaaaaaaa

SEQ ID NO: 58671 - DNA, 542 bp, Homo Sapiens
  misc_feature (503)..(503): n is a, c, g, or t
tttttatgatatattagttttaataaaacagaaccagtccatgtatggaggcatgggcataaggtcaacttgcactaaatgtaactcgtacgttttttctaaaataatttcttgagcattgtggtggccttatgtactaacccgaagctgaacttcctgggaagctgatccaatggagcacttggaattcaggggtggagtcttcttcctgggtcagagctggttcagggtcacatgctcttgaggtccctaaaggccacatgtgctgcatttcgcccagcagctcccatcacacctcctccaggatgagccccacttccacagagatacaggccctggagagggcagcggtagccagaatgcaggggcacggggcgggcgaagtagagctggtccagggacatggcgcagtggaatatgttccctccaggaagcccgaagattctctccaaatctggtggtgtgaggatgtctctgccaaccacagagtccttgaagccagnggcatagacctcgatgcaatcaaacactggggtgccaaa

SEQ ID NO: 58672 - DNA, 552 bp, Homo Sapiens
tttattttttataacagctttattgaggtattattcacataccatgctttaaaaatatacaattcagtggttcttagtacattcacagagttgtgcaaacatcacatctaattccagaacattttgatcactcctcccaaactccataggcattgactttaatgtaatggcatatacatatatagaaatacatatagaaaccaattattctagcaccatttccattctttccccagggactgcaacatcatctgtcataaatcaacttttcatgtctgtgtgaatttggttttgatctccctattgagagactggtgtacagtatttgtctatccctgcacaaattattaaagcaagttttgccattctgttatccttcctcatgaatatcttgattacttttggccctaactcatcaagttccacagaaatcccaattggaatcttagttaaaattgtgttgtctatggaccagttgaagaaaactgacacatttataatactgactctgttccataaagatggtattactttctacttattttgtttaaa

SEQ ID NO: 58673 - DNA, 503 bp, Homo Sapiens
ttttaaaagtaattatttttttatttcaactctataaagtatacaacaggcactcagcaattacagctgcaggaaaaatacagagcaaatcaaagcaggtaaatttatgaaaaagtttttaatctacatcaaaagagtgcaagtggtcaatgaccatttgatgacagtttgttgcattctgactaacaaagaactctttcatgtagaacaaattgtaagaggacaatcaaataaccatagctgtaagaatacaaaagaactgaccagttgtaaaaacatcatacattgaaataaatttgatagatgatgcttaaagaaatgtccctttactcagaaagccccaacctctgagtcattgccaaggtcccagagctctgtctgttgattcaggggcagagaggagggctaacaacacactttcaatgttttgctttctaggtctgttgaaaacttgcctcgtaaatgatttgcatatacaagaactcggaaaaagcatcctgttt

SEQ ID NO: 58674 - DNA, 541 bp, Homo Sapiens
ggccctgcacaccgcgccaaaggcggccagcgacgcgggcaaggcgggcgcgcacccgctcgagtcccactaccggtccccgggcggcggctacgagcccaagaaagatgccagcgagggctgcaccgtggttggcgggggcgtccagccctacctatagaagggccgagcacagcaatgcaagtaagtgggcaccctggtgcttcccagaccctgtggagcctcccagcaccaacttgcttaatgtgtttttcttgcttctggtcatggggttagaagacagagcatttcaatcttgtccagcttttctttccttaagggggaaactttattttctgttttatagattccctctttttggcacaagttctatcactcctttacctagggaaggaaaaaaaaaatatatatatatatgtgtgtgtgtgtgtgtgtaatatatatatgtatatatatagtacatgtatatatatagtacatgtgtatatatatattacacactactgttgttttcttttgaaacaatagattattaaaatct

SEQ ID NO: 58675 - DNA, 576 bp, Homo Sapiens
agaacacaaatacataaatttttaatctgggaaaaatacaaaatgaaaccatgtacaagttatgtacaaaccctttttacaagacaagagagttatcactggttgttacagatgacagagttgggtagatcatttcagagcaccagcatatagtcttttcttcaattcctgtcaggtcagagtaattaatcataatcataatcataatgccaacaatcaaaagattgaaagatgaataagccacgctttttttccttcaatgaacatggaggctgaactctgcatgtgtgtacttttttttttctttgtcccctaaagaaaccttgaagtgcaggttttggtgttaagcagagaaaggtttcttttcaacatctgggtggtgggatgtgggccaaaagttttaggcaggatgtgattgtgccacctgggaatggaacgtttttaattaggatttcccaacagatctgggtttgtgtttgaaatgttgcagttctggtcaaaggcgtgtcaggctgcattgagcggaaggaaggggaggagagcgagcgctctggggcagatgggactctggttttg

SEQ ID NO: 58676 - DNA, 607 bp, Homo Sapiens
  misc_feature (8)..(8): n is a, c, g, or t
  misc_feature (91)..(91): n is a, c, g, or t
  misc_feature (113)..(113): n is a, c, g, or t
  misc_feature (316)..(316): n is a, c, g, or t
  misc_feature (355)..(355): n is a, c, g, or t
  misc_feature (412)..(412): n is a, c, g, or t
  misc_feature (475)..(475): n is a, c, g, or t
  misc_feature (482)..(482): n is a, c, g, or t
  misc_feature (585)..(585): n is a, c, g, or t
  misc_feature (604)..(604): n is a, c, g, or t
  misc_feature (606)..(607): n is a, c, g, or t
gttagaanagaatactttattttgaaataaaatacaaatgtgcaaaggaaattagctcctcctgccccccctttgaacaatgagtcaatanaatgtgagactgggtagattancagataataggcaaaggtctagcttttcagtggcaacttgaagaaaccaaagatgaatgatgctaaaggaatgaccctttggtacctgttttaaagtacttctggcccccttcttttataaacccccaggagcccagcaccacaccttgttaccctacaatgatcactcacgctccacgatgtcactaatgtaataactgaanatatgggccagtttgtccatgtcacgttccgacttgtangtcagggtgaactgtccattaatgctgtaaaccctgaccaacaaagcagaaattacnatgttaactccaaatcctaaactttttggcccctttctccccacacatcaggccagtgtaaangaaacanatccttcaagctgagtaatcctttatccattaacatggtgttacttaaaaactactaagggccagtttggttgctgctgcccctgggaaaccaaaggacaccncccgctcccaaaactgganann

SEQ ID NO: 58677 - DNA, 530 bp, Homo Sapiens
tttaagttttccaataaatttaatcaataaaatatatactggaaatatcacataaaaattaacttacacttcaaagattgtgcagctgacaactcccccaaatcccccaaccctcaggccaaacaagataaaaagaaacaagaaaaaagttgtaacatgaaattgacttgttttgcttggaaataagattataaattagtaaatcaaaatcttgacctctcatgataatcgtggtgtgctgcaggcatcacgatgaaggcggggctgtctgcactcctgtgcttgcgacactaatactgttctctccactgcaccggagcacctttgttcggtatatatatgcctttgttacctctgactcacgtcgcttaaagaccagttttgcaaatgttgttttttaaaagcatacttgtcaaaactgtgatgtaagagaataaaatccttggaggccttgatttgaagctgtgaacctgtagcctaccaaggacagtaaaaacattcccgttgtgaacactgctccagaagcagct

SEQ ID NO: 58678 - DNA, 577 bp, Homo Sapiens
aaattaaattcgattttagtttatttgcagaattttacttaaccagttgtcatttcttcctgtttctcaccattatataaaaacttaccctttgtacaagtatgaaaaatgtggaacaatgaataagtagtgaatattgcacatttaatgtccaaaataaagttgtggtttttaaaggtcacactagatatgtgggaagaaaacgagttgaacacacttaagtatgtgtctccacataagtgattttaaactattgaaagaaaaataaattctatcagtgctcaatgagagacagtacatctgtacattaaaaaataaaagttataatcaacaacattccttcgcaatttcattatcccaaaagaggatcagtagtataattatttttttttcaagttattttcatcaggaatcaggaacctaccagagtgaaggaaacctcaaatacagctactcctggacactgatgcccgaggcatgctgtggaaaccggaccaaaatgaagtctgcgttagtaagtctagaactttacccagcacaacccagacacaaatggaagatggtagaaggggatact

SEQ ID NO: 58679 - DNA, 491 bp, Homo Sapiens
ttttttttttttataaggaagtatggattttattagagacttctttagcttagaaggaacaacaataatacatatatatataaatctatagttgggttgttgtaaaatcctttaacataattgacaaaaaatccatatgattaaataccgaaaataaagtactgggttaaaaaattatagatatttgcacactcatgtttacagcagcattattcacaatagccaagagatggaggcaacccaaacgtccaccaacagatgaatggataaaaaaatgtggtaaatacatgcagtggaatattattcagccttaaaatggcaggaaatcctatcacattctacaatatggatgaaccttgaggacattatgttaagtgaaatatgtcagctacaaaaggacaaatcctgtatgattccatttatatgaggtatctaaattagtgaaattcatagagaaaagtagaatgatggttgccaaggctgtggggaag

SEQ ID NO: 58680 - DNA, 414 bp, Homo Sapiens
  misc_feature (336)..(336): n is a, c, g, or t
  misc_feature (406)..(406): n is a, c, g, or t
gtttgtggtgattgtttattcaagaatatttggaacaaacatccctgcttaatagttactagttaagatctatattaacaaattagttttctctaacaaataaacatttaaataagttcaaaataaaacatcttactataaaacaaacgaacacattttgttttgtaagaatttaatgtgtaaataaatacagaaaaacaagcattacagcaaccagttttgctcatgatagcaattttaaagacacttcaacaaatacttttatgtaagaggctaattctgcaaaataatattcactttcctatggaataatttcacagtcccagaattttaagnccccaaggggaagagaaaagaaagtgggaaagggaaaccgtttcccaatttggggccctttttggggggnttttttaa

SEQ ID NO: 58681 - DNA, 527 bp, Homo Sapiens
ttccaaatgtttaattttttaaaatagacaactacctttataaatcatacacctaacttaaatgtttttttccaattaaaggctgatcttaagaaagctcaggggatagcaccagaagataaaggtaagttggcagcttttgtagtgaaagttaattttgttatttaaatacttatcctcaggaaccattgttcactttgccagattttagatgtttgttcaacagacactacagaatgcctgctgttgggccaggcattatcatatagcaatgaacaagacagtcaaagtccctgccctcaaagagcttacattctactcccattcaagaatatagtagtttttcacgttatttattcttcaagttatcatctctgtagttttttatatgtctaaatactgtttgtcttatggtatcctttgagactgtgttcctattctggttagtctagtcgagagctcagcattgtaagacacagtattcatggtaaatttaacatttgggaccattcaagttgaatgtggct

SEQ ID NO: 58682 - DNA, 707 bp, Homo Sapiens
  misc_feature (658)..(658): n is a, c, g, or t
atcccggtgaagtgtacatcataagaatccatagtactttgaagtaccattgcaccaagatgtctgactgaattcatagtcacacttttatttgaaagaaagaattgttgtagttttttttttcattattctaaaactcttgttgttagatacaagatttaattaagatctaagctcctgcttatttaatgtaattctaaggtaccattttagaaaaaacatttgttttaagattccaagaaacctgtgagttaatactatatttaaaagagaattggtaaattttgaatgtgtgtaatattttggaacctgtttaaaaaccaaatatacctgcaaatagatacagcctatcctatactatttaaatgtttggctgttttgttttatagaaattattttgctgaattcacaaataaaatttaagaagacttttaaaaaaaaaaaaaaaaaactaaaaaaaaaaaacatgtcggccgcctcggcccagtcgactctagactcgagcaagcttatgcatgcggccgcaattcgagctcacttggccaattcgccctatagtgagtcggatcacaattcactggccgtcgttttacaacgtcgtgacttggacagcttggcggaataaccgaagaggcccggaaccgatcgcccttccaancagtggccccagcttgaattgccgattggaaattgaaggccgtaaattt

SEQ ID NO: 58683 - DNA, 515 bp, Homo Sapiens
gttaaagtatttattttgaatttcagaaactacagaattctggatttttaattaagaaaattagacattttagaatttctagataggactttgaaaataaacatggcacaatatacacaaaagtaaatgacaacatgacattaaattttacattgttttgcagtttcaaatttcgtattaatgttctacaacaaattttaaaattcttttcagtgttttgcttcccttggtgttcattattgcctatttataaagtcataaaaggcctaaaaataacttgttactcatattgaaagtctgattttttttttattcccttaagatggaggtctctcactatgttgcccaggctggtttcaaacttctgggctcaaaggattccccatctcagccccctgagtagctgggaccaaaggcatgcaccactgcacccggctgaaagcctgtatttttatctttcgatggacaacagagggatatctcccactctctaagccggtctagttctagtacta

SEQ ID NO: 58684 - DNA, 583 bp, Homo Sapiens
ttttaaactgaacatagtatttattaaggtcaggatgcatgaatagactcttctcaacagaaagataattcaacagcaatcaatttacagaatttagaacagcactacatttcagcaaaatgcaactagagaacatcagataaattatagtaatttgtttttaaaaatccattaaactatctcttacctctgcaataatgtatcatacatgcagttacagaagttagtagggaaaagcatgatcttccttccctattctctgcccatccatcttccaggaaaccacaggctgctgctgcccagagttggcatgaggcttcgaggctgctgcttttccccctacatcataaccgatttcaaatggtgctagacaaaaacagactctgaacaccaggagaaatcggtcagcctgtgtaagagatgggccagtggtgctcccagggtctgcacctcgacagtccaggtggcaagtctgatttcgggtgccccgcaatcaacgccgaatactccagggcatcctctaagagcagactgatggtgtcgatgtggacaaaatggtcctccagtgtactgtcacctctcc

SEQ ID NO: 58685 - DNA, 534 bp, Homo Sapiens
  misc_feature (500)..(500): n is a, c, g, or t
gtggggggtttgactttatttgaaatttttggtagattgttcatttggttgactcctcccaagttgattcatgatgctgggtgaatactctgtgcactgagctctgtaccacacactttggaagggtccaaggaaggcagtctatgcccccaaggggctcacaggctgtcagttcaagtgggagggccatcaatctttcctctggccaggaaaagactgaccattggtctccaaagatgctggatagcattgccagatcacatctaaacaactccgactgcagtttcacacaggtggtggtccaaaatttgtaaaaaagtgaaagtgatgtgtgaagatagggctgagatgagaggaaatggattcaagcctcattggaaaagctgagttagtttgttactttaatttgagcatagacaatggggtcaaagtctgcagaatggttctcagccaagtgattgctcttttcttctgagagtttgaaagttgtgctggcatangtaagtgattcccctgggatggatgaaagcttgg

SEQ ID NO: 58686 - DNA, 479 bp, Homo Sapiens
tttttatgaaaatattacttttttaatgtacaaaaagacttatttacaagttgagcatgtcatctcaattcatagcatgtagaaaaagctaaaaatgttttggagatataaatttggctggacgactcacctacagtatattcagggatgtcttctgtacagaatatatacaggttgggactggcaagggaaatcctatctcaggaaggcgatgaacaccaccacagagccacagacccttagcaatgttccctggctttcatttgcagttggccttgtctctggacagagtttgatgtgctgggacgcagcgagcccagatgacgatgttggccttgtcctcaaactctcctaagaagttcctcattaaggccaaggtcacagtcagagtcacactctgagtggtgctgtttggcaaggttgccacacattccccatgaaaaggtttggggtgtgtgtgtgtgtgtgtgtgtgtgtgt

SEQ ID NO: 58687 - DNA, 563 bp, Homo Sapiens
  misc_feature (477)..(477): n is a, c, g, or t
aactgatgtaaagatatttattgtcaaaatatattcaccatacatgtaagaaagaatgtacagtataatcccaatattactttcattattatttttatctttcgaggcagagtctctgtcaccaaggccggagtgcagtggtgtggcctcggctcactgaagcctctgcctctcaggttcaggtgattctcccgcctcagcctcccgggtagccgggaccacaggcctgtgcaaccatacctggctaattctatttttttttttcaagtttagaattcctggtttattgggaaaacttcataatgaaaacttcaattgccctttttcaatgcttaccaaataataatgtgatatttaaaatgaattgtttttcattatgtaagtggaaatggtaaaaaatagtaataacccatttgatgcatcatatatatgctattcagggaaactcaaatccctgaattctcctgtggcatgttntacatcagacattttaaatctgtttaccaagaaagaccaggattttaactatatgtaggtttctacttacagttgcaatctatcag

SEQ ID NO: 58688 - DNA, 546 bp, Homo Sapiens
gtgggggtaggaatgcagtagagaaacaaaaacactgcacaaagggtgcagtgttctactattcatctaaataatggagaactggcattttacaattaagatataaaaaatattcatactttcagaatttccaagtcagaggtggcttacaacagctttcattagaaaagggtgagacgcccaaataaaatgctccctggtggaacaaagtcccctttaaacctttaccaagctctttctcagaagctcacaaaacttaagacaatgtgaacatgatgagaaagcaaagctctccaacataaggctgaaaatgacaataaaagactgcaataaaagactagtgggatgaacatgaatgcttgtcagtgacaaacacattatgcctacaaagaataaatactgcacttctctttaggtctatttacagacaggaccccatgacctttcaggcataaacctccactggcagaagtaagaatttaatcacaaaacttctatggtaaattaaaaaaataagaaatttggatttaggccttctgccatttc

SEQ ID NO: 58689 - DNA, 596 bp, Homo Sapiens
  misc_feature (547)..(547): n is a, c, g, or t
  misc_feature (564)..(564): n is a, c, g, or t
tactgagcaaatataccagctataaaagtttattaaaaaaagggacaacatatgtaaacatatttttcagtcacaaggcttcataatacagcacattaggcccaggccttaaatctctgcagtgagagtaccttaattttttactaacagtaattgacttatctttcagtgaacattaagcctacacaaaaataaataaccagattctgctaagtttactaacacagaaaattgcaaatgtacaatagattgcagcaaaagttaactatctgcagtaacatgtgagattgaattgttatattacaattattttaatacagcttcattttgaaattcatcataatgtagagttgactaaaataaagctaaaggggaataataacagagataaacaaacacccagatcacatacactccccaacacacacatgcaaacacacatttactaatatgcatgcacacacacacacgccaacatacatgcacacacatacagggatgttgtggtagaagtaaaactgaggacatagtttccatcctttttctntcatgtattgatgattntaggtatatatttctctacccttaagctggaa

SEQ ID NO: 58690 - DNA, 4415 bp, Homo Sapiens
gccgccgccgccgccgccgcctcctgggaaccaggggactgaagagcctgcgagagcggaacactgccggaccccgggtgggggggcgcagcagctgcgcctggccccgcccaccacacctgggcgcccgtagaaccgcgcggggcggggcggggcaggaggctggcctggcgctccggccgctttgtcgaaagccggcccgactggagcaggacgaagggggagggtctcgaggccgagtcctgttcttctgagggacggaccccagctggggtggaaaagcagtaccagagagcctccgaggcgcgcggtgccaaccatggagcgggccggccccagcttcgggcagcagcgacagcagcagcagccccagcagcagaagcagcagcagagggatcaggactcggtcgaagcatggctggacgatcactgggactttaccttctcatactttgttagaaaagccaccagagaaatggtcaatgcatggtttgctgagagagttcacaccatccctgtgtgcaaggaaggtatcagaggccacaccgaatcttgctcttgtcccttgcagcagagtcctcgtgcagataacagtgtccctggaacaccaaccaggaaaatctctgcctctgaatttgaccggcctcttagacccattgttgtcaaggattctgagggaactgtgagcttcctctctgactcagaaaagaaggaacagatgcctctaacccctccaaggtttgatcatgatgaaggggaccagtgctcaagactcttggaattagtgaaggatatttctagtcatttggatgtcacagccttatgtcacaaaattttcttgcatatccatggactgatatctgctgaccgctattccctgttccttgtctgtgaagacagctccaatgacaagtttcttatcagccgcctctttgatgttgctgaaggttcaacactggaagaagtttcaaataactgtatccgcttagaatggaacaaaggcattgtgggacatgtggcagcgcttggtgagcccttgaacatcaaagatgcatatgaggatcctcggttcaatgcagaagttgaccaaattacaggctacaagacacaaagcattctttgtatgccaattaagaatcatagggaagaggttgttggtgtagcccaggccatcaacaagaaatcaggaaacggtgggacatttactgaaaaagatgaaaaggactttgctgcttatttggcattttgtggtattgttcttcataatgctcagctctatgagacttcactgctggagaacaagagaaatcaggtgctgcttgaccttgctagtttaatttttgaagaacaacaatcattagaagtaattttgaagaaaatagctgccactattatctctttcatgcaagtgcagaaatgcaccattttcatagtggatgaagattgctccgattctttttctagtgtgtttcacatggagtgtgaggaattagaaaaatcatctgatacattaacaagggaacatgatgcaaacaaaatcaattacatgtatgctcagtatgtcaaaaatactatggaaccacttaatatcccagatgtcagtaaggataaaagatttccctggacaactgaaaatacaggaaatgtaaaccagcagtgcattagaagtttgctttgtacacctataaaaaatggaaagaagaataaagttataggggtttgccaacttgttaataagatggaggagaatactggcaaggttaagcctttcaaccgaaatgacgaacagtttctggaagcttttgtcatcttttgtggcttggggatccagaacacgcagatgtatgaagcagtggagagagccatggccaagcaaatggtcacattggaggttctgtcgtatcatgcttcagcagcagaggaagaaacaagagagctacagtcgttagcggctgctgtggtgccatctgcccagacccttaaaattactgactttagcttcagtgactttgagctgtctgatctggaaacagcactgtgtacaattcggatgtttactgacctcaaccttgtgcagaacttccagatgaaacatgaggttctttgcagatggattttaagtgttaagaagaattatcggaagaatgttgcctatcataattggagacatgcctttaatacagctcagtgcatgtttgctgctctaaaagcaggcaaaattcagaacaagctgactgacctggagatacttgcattgctgattgctgcactaagccacgatttggatcaccgtggtgtgaataactcttacatacagcgaagtgaacatccacttgcccagctttactgccattcaatcatggaacaccatcattttgaccagtgcctgatgattcttaatagtccaggcaatcagattctcagtggcctctccattgaagaatataagaccacgttgaaaataatcaagcaagctattttagctacagacctagcactgtacattaagaggcgaggagaattttttgaacttataagaaaaaatcaattcaatttggaagatcctcatcaaaaggagttgtttttggcaatgctgatgacagcttgtgatctttctgcaattacaaaaccctggcctattcaacaacggatagcagaacttgtagcaactgaattttttgatcaaggagacagagagagaaaagaactcaacatagaacccactgatctaatgaacagggagaagaaaaacaaaatcccaagtatgcaagttgggttcatagatgccatctgcttgcaactgtatgaggccctgacccacgtgtcagaggactgtttccctttgctagatggctgcagaaagaacaggcagaaatggcaggcccttgcagaacagcaggagaagatgctgattaatggggaaagcggccaggccaagcggaactgagtggcctatttcatgcagagttgaagtttacagagatggtgtgttctgcaatatgcctagtttcttacacactgtctgtatagtgtctgtatttggtatatactttgccactgctgtatttttatttttgcacaacttttgagagtatagcatgaatgtttttagaggactattacatattttttgtatatttgttttatgctactgaactgaaaggatcaacaacatccactgttagcacattgataaaagcattgtttgtgatatttcgtgtactgcaaagtgtatgcagtattcttgcactgaggtttttttgcttggggattattttaaataattggtttttgtgttttctgaattaccattttttcaagaatgtttggaatctttcctttttcaaaagtaggttaggagcaaattatcatacattctgtgacatttaaagcctttataggatagtgaaaaatgctggctgagtggattttaagagaaataattgtatttgttaacagtgtctttttttaaaaagttaaggcactctgaaacaaatggaaagtcctatgaaactgtattgtaaagaaaacattatttaattgatatgctgttttgtgagagaacaggcaagacagaactttgtcacttcagtgcagtacatttttctgaaagctacccataaaatcactttcatctcacctacctgatgcaaagcaggtgaaaccttaggagatgatccagtcactgacttgattgagggataagtgtgatttagaaatggaatggccttggatgtctatcagtgaagaaaaatgttctgttagaagatctctctaagagtttttttccttctgagcttccttttcaaaataaaagtgacaattgtagcattgacttgaagtgagacatggttatagataagagagtacaaaatgactctttttcctgtcaattgaaatttaaagaaaagttttaattatataaatagcaaagggctattgccaatactagggtcaaaaatgaatttgagggaacagtgggtaagaaactttatgcctgaataacatttagcagtattgtgattgaaaaattgccatattttgatgtataggacaagtcaactgagatccagagaatcctggatgtgaatgctaaacactggcccttaactcacattcaatgtattttcttcccataacatttagtatagttaatattttcttagaatttgagcccatttaagtggattaatattctacatgtgtgcccctaaagacacatttcttgagatgagatggaatctactcctcgtgaagaggctgtgaacattgttgaaatgacaataggatttagaatagtacacacatttagttgataaagaagtggcagggtttgagaggattgactccagcatacaagcaggcccggtaatgggcctccacgatgtccctgccataggctctgtcccgaattc

SEQ ID NO: 58691 - DNA, 662 bp, Homo Sapiens
ttttatatttcagaagaagtttattaagaggttttaggctttaagcatatgtgaaaagcaaaaattacattttaaagtatataatttgcattttccaccttctcaatgccaatgaaatattctaggagactctataagataaccaattgattttctactactcccaaattttaactttgtaatttaaagaggaataggcaaatagagctgctgtggttctggttctccctgcaggatgaagggggcctgcaaaatgtctcctacttccattctagtcattcagcaaggtgccttcctctggatgcactgtctgtatacttttgccatgttgcatcacataatgattctgcccaccttcaccatttgactgtcagtaaaagaatgtatgtgctcatttcttcttttattatagcgcagtgctcttcatgaagtctgaatcttgtttcatttgtgattgtaattagcacttgcttcttcaagactggctaaatgatgataatcagtgaagttctgtgatgggcacatggatgtgtattatatttttctactttggttaatatttgaatattccaataagttttaaaataacttgtttgtttctgttattagaatggcctgtccagaagacagcccaatacattcctaaaacagaactcactgca

SEQ ID NO: 58692 - DNA, 581 bp, Homo Sapiens
  misc_feature (10)..(10): n is a, c, g, or t
  misc_feature (14)..(14): n is a, c, g, or t
ttttgacacnatgnaaaaaaatattttatttatttggagtctagtgcataaattggtcctcgggatacttgattactttccagctattgaaattaggggagggggaaatgaggatgcaaacctaagaaggttctgggcgggatgatttgggcagggctttttgaaagcagcgcctgctttgctgtttttactgccttctttctagacacaatcgacttttacactggggagaccagagctcacttttctgcattaagtaacaaaaaataaactttgaaagaaaactgacaatcaaagaaaaaacacaagagaagttgtaagaagaattgagctatgaaaaagctaaggtgtagaaaaagaaaccatcatttggagacgcgtacctaagctttttctctaggaaatgctgtcatgaattcttcctttgtagtgatcattagttcatttctaaagaaaacaaacattccccaagatgtaaagtaataatatttcattaatgaaacataacaagtataaacaccttgtttactcctgtttcttatacaaaatgggcaaaaatgtcttcaaggatttataaccat

SEQ ID NO: 58693 - DNA, 524 bp, Homo Sapiens
tttttttttttttttttgtaagaacattatttttgtttcactacagagaggctctaacactgctgtgtaaacattaccaacaataattatttattttctattatgtacctgttcatttctaagagtaatggacaaaagaaaaggctctcctttgtcctccctctcttcctaattaaaagagccttctgccccatggaaggctgggagctaggaaaagcagcattctcacaatagactgcaatcagaagatagattttatgtcaggtcatctagttacatagatatttccctgttgttattcctgagtccttagtaaaaaccttaattaaatgttccagccttgtctcggctgtgctataggaggtaaagcacaagtttatgtcatgattggttcagtgacaaaagggaacagactctttccaagagcaaactgggtgacaaggataaacttagtggtctagcagatgtgtttcagtggagtctcccaccgtccatggggaaagcatgcaggttttattttctca

SEQ ID NO: 58694 - DNA, 491 bp, Homo Sapiens
taacgttttaattttatttatttgggtaccagtgattgattccaaataaacctttttacaaaaaggcaataaggtggtttatggttacatattaaatataataggataacaggtagatgagaaagtaaaatgaaaaaatgaggttaggagatacaaagtagacccaggaatgaggctagaacatttataatttggtgttgatgctgtcatctgataggggatgttgctcgtactgttgctctgaggggagtacatcttgagtattttcaaataatgatgtgaagtttgaggtaggtatctttccaatgttctaactttactagaattaggttattaagcttctctagtgcccttaacttttgttacatagagatttaaagaaaaagaaagtagtaccttagtatgtaccgcatccttcttttcctcagccaccctatcataacagaagttatttcccttccattctttatttggctttgttctttccctgt

SEQ ID NO: 58695 - DNA, 490 bp, Homo Sapiens
  misc_feature (8)..(8): n is a, c, g, or t
catttttngtaaaagtttttttgtaattaccatctgcatacacctgagagactgtttctaacatgttttggtcatttttaatcattctatctgcctttctttgttataaggatctatttttaattttattcactcctaacatagaggggaagtgcataccttcaatgacgcaaagtaactagttaatgttgtttcagaataatatgcaaaagggaagggaggaaacagcacaaagtatatcatatttttacacatcagacaccttcaggaagaaaggacatttctcatcttagtgtgacagactctggccaatatcccctttgaacatctgctttcgctggttggtaaaaaagtgtcattttaaatttagtgttactccttcaggctattccctctctcttcttacttgcagggccaaagcaacgtctctttccaccttggtcaccttccaacaacgatttcttcggacgcctttgttaatcattccgtc

SEQ ID NO: 58696 - DNA, 3043 bp, Homo Sapiens
cgagttggaagaggtgagtcctgtctcaaaatggaggtaaaaccgccgcctggttgcccccagcccgactccggcagtcgccgtcgccgctggggggaggagggccatgatccaaaggaaccagagcagctgagaaaactgtttattggtggtctgagctttgaaactacagatgatagtttaagagaacattttgagaaatggggcacactcacagattgtctggtaatgagagacccccaaacaaaacgttccaggggctttggttttgtgacttattcttgtgttacagaggtggatgcagcaatcggtgctcgaccattcaaggttgatgggcgtgtagtggaaccaaagagagctgtttctagagaggattctgtgaagcctggtgcccatctaacagtgaagaaaatttttgttggcagtattaaagaagatacagaagaatataatttgagagactactttgaaaagtacggcaagattgaaaccatagaagttatggaagacaggcagagtggaaaaaagagaggatttgcttctgtaacttttgatgatcatgatacagttgataaaattgttgttcagaaataccacactattaatgggcataactgtgaagtgaaaaaggcccttgctaaacaagtgatgcagccggctggatcacagaggggtcgtggaggtggatctggcaattgtatgggtcacagaggaaactttggaggtggtggaggtaattttggccgtgatggaaactttggtggaagaggaggctatggtggtggaggtggtggcagcagaggtagttatggaggaggtgatgtggatataatggattaggaggtgatggtggcaactatggcagtggtcctggttatagtagtagaggcgggtatggtggtggtggaccaggatatggaaaccaaggtggtggatatggtggcggtgttggaggatatgatggttacaatgaaggaggaaattttgacggtagtaactatggtggtggtgggaactataatgattttggaaattacagtggacaacagcaatcaaattatggacacatgaaagggggcagttttggtggaagaagctcgggcagtccctatggtggtggttatggatctggtggtggaagtggtggatatggtagcagaaggttctaaaaacagcaggaaaagggctacagttcttagcaggagagagagtgaggagttgtcaggaaagctgcaggttactttgagacagtcgtcccaagtgcattagaggaactgtaaaaatctgtcacagaaggaacgatgatccataatcagaaaagttactgcagcttaaacaggaaacccttcttgttcaggactgtcatagccacagtttgcaaaaagtgcagctattgattaatgcaatgtagtgtcaattagatgtacattcctgaggttcttttatctgttgtagctttgtctttttctttttcttttcattacatcaggtatattgccctgtaaattgtggtagtggtaccaggaataaaaaattaaggaatttttaacttttcaatatttgtgtagttcagtttttctacattttagtacagaaactttaacaaaatgcagtttcgaaggtgtttccttgtgagttaacaagtaaagaagatcattgttaattactattttgtatgaattttgctaaagttaactgtaaagaaacacctgctgacttgcagtttaaggggaatctattctccccatttccaaaccatgatatgaatgggcgctgacatgtggagagaatagataatttgtgtgtttgcaatgtgtgttttagataaataggattgggtatttaaattagcatttgtgaatttaatagcattaagattaccttcaaatgaaaaaaaatctcaaaatttctatttggtttttgtgcattttcttttaaaatgtaatcatatgattttagtgtgttagacttgctgagtcctagctgtgtttagaacagaacatctctattctacatttaccttggtcaaatttgaactgctgccataggttttgggtgtaaagaatgtttactgccctccatttaaattctgaaaagggatggtggatgttttccctctcctacgttagaaaccattcttaaaaacttttgaaaatatagaaccattaagcctgctatatctgagcaaattagtgggtaaccttttttccttttttaaagcacaagaggcccataaatcttgagttatttgcattagtttacattttttgatacaacttttcagaccaagagaataaaaatcatgcgttattaaacccctagctggctggcatgctttcctgtttgtactgtatacattttgctggatgaaaccaagatagtttaggtataattgtccaaaataacctaactgcagcagaaatgtaggacagttgcttagtacaggcttctcacttcctacagacctgaattcaaatttggatagtctgagttattaaattcccaaagacaaagaacacactcttatttcttgtgtatatttcaacataaatcatgttgttaccaatttgttgggaaggccctggttgagaagagttttagataataaggctgtatatatatagatatatatagatatataccaatgtctatatatagagatattttatatatatatatacaggtatatatatgtgtgtgtatatatatatatgtatatacatatatacatatatatatatatatggatatatacatatatatatatatatggatatatacccatgtctactgttttgcttcagctagtgcttacaatttcattcaagtcctgagtatgtgtcctgctgttactccttctttggtagttgaaagttgaattcaagtctttccttctgttttaagaagtactaagcaaacaagcaataaaaaggggaatggcgcatgctagtgtttgaatatgctctcttgttgctctaattctgtgcctccgtgcattaatatttggatgcatgcaatgccacatggaaattggcctcatggc

SEQ ID NO: 58697 - DNA, 570 bp, Homo Sapiens
  misc_feature (509)..(509): n is a, c, g, or t
  misc_feature (559)..(559): n is a, c, g, or t
tttaaaacaaaatcaattttatttctttaaaaacgtatgacaaaattttttctgccatcggccatgctcagatttatacattataaaatgatttaattccctaaagtacaaaaaagaatggctgaatctccaaagagttgataaagactgaagatgtttataaggcatgcttatgtatactatttcaagccatctacaggacttgagacaggaatgtttagtgtttgcaaagccatagtcactgagccagactttgtggtgatcccagagatcctttcatttcacagaactgtccttgacggcttctcccaataaagatttacaaccttatctcttggctgtggcagtatgagaggatcttctttcagtacatatactaaagcttcattggagtagccacgcttaggaagtaccaagtaaatgacaacataaggccaaatgcaggcagcaggtatttttcaataatgaattagcaggggctccaagaatacaacaagagaaagtgattnttcacagtgcttgagaggcttaatctttcccaatcctcctttatttgcanaggtgtaggct

SEQ ID NO: 58698 - DNA, 536 bp, Homo Sapiens
  misc_feature (483)..(483): n is a, c, g, or t
tttttaatttctaaacatttttatttcaaatctcttttcacccctccccaaaaagacatgggtaggtacagcaatcataaaaaggagatacaaacacaagagtcaaatgtctctcgcactgacacttacaaaaaactgggaattgtacatggggtttccaaacaggacctgcagcagctactaacgtccctttacgagagtcaaacatgcctattaatacagtatatacagacaccccattctggaactaatctacagggacatccctaaccccaccccctctatccccagaaaaataccaaaacacacccaaagtgcatttgttttgtttatatcaaaacctctttccctttccccatcccaccctcagacccctcccaccccatttaagattggcctgcaagtctattttaaccatttagtatttttttatagtttatgaaaataaattatacagcaactattttaataaattaagcacanaaggaagggtaaaagaggaaaactaaatgggaagacaaaagccaggccacgct

SEQ ID NO: 58699 - DNA, 590 bp, Homo Sapiens
tttaattgaactcttagcttctacctatttccatttctttttttccaggtactaagttatctctcccttattttatacaacttcctatcttcctacctactcccaaattaataaatcccaattaatcaatcaactcccaattaatcaattatctcccaattaatcaatctctgctaagagttccttacccttccactgagcatggctactttgatccttttaccccaaacataagtatttataatatttttatacctttgtatagtatccattttataattttaccatattctttaatagcgactcaactgcacttctctgatattaagaccatggataatataactcaagagtacgtttttttcataccaacaattccatggttggcagtgtccaagtggttaaaaacatgtctctaaaattaataaaacctgggtttgagtcctagttctgtcatttaataattgtgtgagtttgggaaattttctaaatcttatctgcttccctatttgtaaaatgaggagaggaatacttattttataggtttcccgtgataattgcgtggataatgcaagcaaagtgctgcagat

SEQ ID NO: 58700 - DNA, 525 bp, Homo Sapiens
ttttaattgataacgaaatctttatcaaatggggaagtgacatttttcttttaaaaacttgcctcacccaacaaagctaggaattttcttagaatgtaagaacttgcctgataacatggtaccctgatgccttttcctgccctttttaactgtgggttattacagagatatcaaagacacgacggtgggcactctgtcccagcggatcacaaaccaggtccatggtttgaagggactgaactccaagcttctggatatcaggagctacctggaaaaagtcgccacaggcaagctgcccatcaaccaccagatcatctaccagctgcaggacgtcttcaacctgctgccagatgtcagcctgcaggagttcgtcaaggccttttacctgaagaccaatgaccagatggtggtagtgtacttggcctcgctgatccgttccgtggtcgcccttcaaagatacaattaaatggcttgatttttaagctgtgttctagtcgtttttgacttcgggagtagtgatctgta

SEQ ID NO: 58701 - DNA, 518 bp, Homo Sapiens
  misc_feature (403)..(403): n is a, c, g, or t
  misc_feature (420)..(420): n is a, c, g, or t
  misc_feature (429)..(429): n is a, c, g, or t
  misc_feature (450)..(450): n is a, c, g, or t
  misc_feature (474)..(474): n is a, c, g, or t
  misc_feature (482)..(482): n is a, c, g, or t
  misc_feature (489)..(489): n is a, c, g, or t
  misc_feature (513)..(513): n is a, c, g, or t
ttttttttttcggtcatactacatttcactttattattattaacatttatcatacacggttactattccaatctttcatgcagacaaaaataaacaatataaaatacataatgcactttgataattttaaccatacataaaatatggagtaatggaagctatgttacatggatattttacaaaggaaaaaaagatgacttttataataacacatccagatgaaatttatcattaaattttggatttcatatgatgttaagtatggatatattcaaaacaattactatttatagaaccaatttgatattttgtcatttaaaataatgaatactatgtaaatgagtacttataaaaatatttttaggcaaaaagctctgttctactcatttacttgccagttacnaaaatatatattcatcnggaaacccnaataaatttggcctgagggcnttagatattccaattccaatggcntattttcnaaagcgncctacccattaggggtcctgggcnaccat

SEQ ID NO: 58702 - DNA, 573 bp, Homo Sapiens
aattgataaaaattcattttttatttgaaaagtgtgcagaaacaatcactgaatacaattctcaaccatagtattcatagccagacaccaaaaaatcattggatgctatgatttctgaagccactagaactttggtacaacaaaataatgacctaacagtgtgcgtcaggaaccacagtctattaaggggcatatagaataaaaacttcaagtttatagttttaagttacattcatagcactagacaaaacagatctatataggagacagacaaaataatcaaacgtgcttagcctaaaaataaagataatattacttgaaggtaaactgttgggatacaatgaagcacttcagtgttatattagaacatcgtctacttttaacacactaaagcaggataatttatttttttaaaaaataatttcagatacaatcagtatctcttacaaggctatggacacagaagccctatttgtacatggaatattttgaccaacttgtaatatactacctagaattcattggtttccttgaaataaatacaagatgacatattttgtcaataatgagatg

SEQ ID NO: 58703 - DNA, 443 bp, Homo Sapiens
taggttaaacttttttattatagtaatgtatcagagtaattgaaataacttcaccatacagatatcacatgctggagcatgacaatgcaacgctaattgcacactgtattgacatttcaagcatattttctgtaacaacatttgcattcatatacaggtagtaaagcacacggggataatgtgagtcatgattcatgttagcaaatgtattgctttcaagctaatcctcatacccagaatctgcagcaaaaccattaatattcagatgttgtagcatgtacagtagttattgtatgaactgaatagctcaggaccaagaattgctgttagcctttgaaagagaaatatcagtgttatttcattacttttgtaaggtaagccttattactaatttaggaactattgggtccattggattgtacctgtagataatacagcgcagg

SEQ ID NO: 58704 - DNA, 610 bp, Homo Sapiens
gcattttaataaacttaatttaatgaagcgctgcattccacaagtacagtcagtacagtagctctcctttgggatggaaaaattacaagaagcaatgccgaggaccgtgaactgtatacagaagccttgtggatctagaaaccaacagtgtgtgaacttaggacattctcaagttttaaaacgtggccattataatatcatcacattacataaatatcacatcaccaatattcgttttgctttttttcttttagaaccaaaaaaaatgcttgtaaactgcaaaattactttagatcactgcgataaatctgaattaactactaagtaccgtcagcccttcatatttgtgagttacacatctgtggattcaaccaaccctggatggaaaatactcagaaaaaaaaatcagtacagagtagtgtctgtactaaacaggtacacacttttttttcttgtcattattcactaaatacagtaataacaactaattacatagcatttacatattaagtattatatgtttagagatgatataaagtatacttgaagatgtgcataggttattcgcaaatactacaccaagttatgtaaggcgcttgagcatccatga

SEQ ID NO: 58705 - DNA, 463 bp, Homo Sapiens
gaatgctcagtgtgcgaaatttattgatgaacagcagattctacattggcagcactattcccggaagcggatgcgccttcagcaagccttggcagagcagcaacagcaaaataacacatcgggaaaatgaaaaactggatacaaacgaggcacttaatacatgtatataatgtatttcttttgtacagtgaagacaaaaaaaatgaaaactcttcctatctacctttattatggtagcccctagaacctttagtgtgctttttcatccaactttttattgttaatagactatttctgttaaacctgaattgttctttgatttccctgtggatttgtaaggtgtttttcttttttacgcatttagcataatcagctgattaagaatggaaaagttaggtgctttagaccaaataaggcactggggcatggggtaggggtgggccaccaagtatactgaattcta

SEQ ID NO: 58706 - DNA, 1306 bp, Homo Sapiens
tgaaaaattttacagttaaaggaacattagtgttgcatttgcaataactaggacaagagccagtcacatgctgatcttttaagtaatgagaatactaagtaaattaacaccataacatagatttaaagaaaaaaagccattagaactaaattaatataataacgtccagttacagcctctggttctgcttaaaatttatcagattctatttacacgtagggaaaaggacataaaatgaatcttagccttgaatatattcatacttaattaacgcatcctaaaaaaccattaacttaaacatcttaaagtgttctataatgttggctttatatgttttaaagtaagaaactttctgccagtggctttctttcttttttttttttttttttaaagagaaagcatcttgttctgttgcccaagctggaatgcaagagcagagtaacagctcactgcagccactgcagccttgatcccctcacttcagcctcccgagcagctacaatcacaagcacgggccaccaaggccggctaacctttatttcttgtagacatggggtcttgctatgttgcccaggctggtctcaaactcccgtcctcaagcaatccacctgattacaggcatgagccactgcaactagcccagtggcttaatttctgcttagaaaaatataatacctatcatacttaataaacagatagcttaaaagcactgttctaataagagaatttaacatacaaaaacagtattcattttggtttatactcttaaaagattaaatattctggttgtatttaaaaataaatttttaaactttcatgaaagaatgtacggccaggcatggtggctcacgcctgtaatcccagcaccttgagaggccaaagtgggtggatcacctgaggtcgggagttcaagaccagcctgaccaacatgaagaaacctcatctctattaaaaatacaaaaaattagctgggactacaggtgcatgccacgacgcccagctgatttttgtgtttttagtagagacggggtttcaccatgttggccaagatggtctcaatctcttgaccttgtgatccacctgccttggccttccaaagtgttggaattacaggcgtgagccaccgcgcctggtctatatgtgatttcaaattaggtggccttataaatataagcagatggtttctgggcaaaatcaaatgatttctgtctctattttcttgagtaccaattgtaaaaactgaaattaggttgaggaaagtgctttagaaataataaagatgtacaaatacaaaaaaaaaaaaaaa

SEQ ID NO: 58707 - DNA, 548 bp, Homo Sapiens
  misc_feature (100)..(100): n is a, c, g, or t
tttggatgttaaaaaggaaatgtttattttcatgttataaggtgattacaaactcctctaaaaaaagcaaagatgaatttaaaatattgatatacatatnttatctaaaaagcgaaaagaagaaaaaacacccctgcaaaatacaggggaatcatatcataaaacatttatacacaaaagcttgtatactgcaagactgaactacacaccaaggatcttgttcaaatacaaatgttcctcctcagaaaagtctcttgttggttgattttttttttataaaagtttaaaatatcttaaaaaatatttggaagttttaaaaaaatgtcctgatgagccagacatatttctggaaggaggcaagacccactttctcagctttctcttgtgctaaatacagagtcacagttgctagggattgggagattaattgggtaaaaaaaaaaaatgaagccaacatctcaatttgaagtcaaatatataacaggatgctccatccctcggagaacacgccagaacatgtctgtagtgacacccacaagagaacaatg

SEQ ID NO: 58708 - DNA, 473 bp, Homo Sapiens
ttttttttttttcctgttacgccgtcaatgcagcaggcaatgaggggaatgacacagccctctcattcccggaacgtagtcaatctcggctctgcggatttcacaaaacacactttgcctattgccggctccaacaagaagtaactttccaggaagctgccggccccggcagccgccaggatcgctgcctgcgctgcgctggccgccggggattcacccggggaggcggggccgctggggaaggctcgcggggaatacagcacactttcccctaaatccctcgtccgcgccgagtgcagggctctcagagttcacctagtcccacctctcacccacaacagtttataaatggggaaggtcagacaagttagtagcagagctgggtctagaacccaggagttcgaatacaatccgaggctcatatcgagactttaagttgtccgattccgaagtttatttgcttttttccctct

SEQ ID NO: 58709 - DNA, 701 bp, Homo Sapiens
gttaaaatatgcctaaatttcctctttgggaacgcaagacttgcagagatgactccatggagagcggactctgccggcgggaactggagtcgttggtgacgtcatcccagtctgatctgtgaagggtagggccagcaggcagcaccaaagttcccgtatgcgcgttttcagtcttcatttaggtccgaattcccggcatataagaatactaccgtcgcttgtttttcagatttttgcggctattttcgttggtgtgttggtcatgtctggtcgcggcaaaggcggaaagggactgggtaaaggaggcgctaagcgtcaccgtaaggtcctgcgagataacatccagggcattaccaagcctgccatccggcgccttgctcgtcgcgggggtgtcaagcgcatttctggtctcatctacgaggagactcgcggggttctgaaggtgtttctggaaaacgtgattcgtgatgctgtgacttacacggagcacgccaaacgcaagacagtgacagcgatggatgtggtctacgcgctgaagagacagggacgcactctttacggcttcggcggctaatgctaccgcttaaacgactcagcatctcgacttcccaaatcaaaggcccttttcagggccgcccacagttttccgcaaaagagctcatgacttgttagacgattggttagtctctttataagttaat

SEQ ID NO: 58710 - DNA, 507 bp, Homo Sapiens
ttttggcaaaaagccctttatttcgacattaaagatttggaggtacagtttgctgtacagaagttttcacccctccataatttcaccagatatagagtgtgcatccctgacactgaaactgaaggctttatggtttcatcttctaagatagattcccaaagagagttggttcacctgagtcccagggggctgacaggggacagtttaaaacattgatgaatctttattactacaaaagggttcgatttaggctagccaacatgtaggtctttttatgtcctagaacccagtgacttcccgtctgtctgtaatggcatgaaggcaggtgactgtagaagatcctctcgcactagcgcacacagaatgttttcttgcacccgggccctgcctgatggcctgcaccactgagcgaaaaaacctctccgtccccaccagggtgccttgagtcaactagtgctggcccctcacccccttctacttacccccaaccccggaggctgtcgacgc

SEQ ID NO: 58711 - DNA, 2106 bp, Homo Sapiens
taaattaaataattaaatagatgatttttacatactgtagagctatagagaaaatatagctggatgggtgatagtgacttggggatgggggtggctactctggatagggtagtttaaggtgacatctctgtgcagatgtagaatgggctagtgctttctaagaactgaaagatcagtgaagaaggggagcatagtgactgaggagtagtgtggcattagatggggtctgagagttacacaggaacatgtggagcctgtaggccatggtaaagcctttttctactcttctggtgatttaaagccattgtaaagttttgagcttgggagtaggtagcaaaataagatttatatttttatggggttactctggctgttgagaggagaaaaagacatgaatctgggaggccacttgggaagcaaggccatcagtgaagagaaagagtgggagaaaaaggtttgaggagagaaggtataggactttcactaaccttggaccatatatttgccaggaagaatgtaagttctccaacatcttcaaataaagaagtggttatgaggaatgatcagaataatggagatatgaaaccattccagaatttcacaacaataccaatcacacaggctctcaactacaatctgagcaaagaagggcatttagaaaaagaaccttggaatgcattcagccatcatggcccagttaatgtctccatcaatggaattccttgcattctcttctgggccaaaagaataatgattaaatttaagaatcaaacctggctggaccttacagacgagccatttggtcagaaggtaactgtggaccctgacaactcaaattgcagtgaagaaagtgctagaaaaaaaaagtaggctcctttgtataggaccctgacacacatctttgaggaagtatttactgtctaaaataaaggaacaagtcagaagttaacttcaaaaattgttggctgggcatggtggctcacgcctgtgatcccagcacttcgggaggccaagggagtggatcacctgaggtcaggagttggagacaagcctggccaacatggtgaaacctcgtctctactaaaatacaaaaattagccgggcgtggtggcaggtgcctgtaatcccagctactcaggaggctgagacaggagaattgcttgaacctgggaggtggaggttgtggtgagctgagatcgcgccattgctctccagcttgggtgacagagtgagtgagactccatctcaaaaaaaaaaaattgttatattttcccggcagttttcttctgaacctttttgctaattgtcggaataacttgtagaaaatgagactttggaaagcaagggttctcaaactcgttttgaaaacagcaaaggattccaggcttggtctcaactccaaatggttgtctttgaagcttggtgatgctggaaaccccagaagtcttgctataagattcatccttaccaattacaacaagttgtccatccagagttggtttagtttgcgccgagtcgagatcatttccaacaattcaatccaagcagtctttaacccaactggcgtatatgctccctctggttactcctaccgctgccaacgcgtgggcagcctgcagcaggaccaggccctcttgctgcccagcgacacggatgatgggtcgagcctgtgggaggtcacttttattgatttccagatccaaggttttgccatcaaggggggacgatttaccaaagcccaagactgcgcctcctccttctcgccagcttttctgatcggcctggcaatgtccctgatcctgctgctggtgttggcctatgccctgcacatgctcatctacctgcggtatctggaccaacaatatgatctcatcgcctctcctgcccacttctcgcagctgaaagctcgagacacagccgaagagaaggagctgctgaggagccagggggctgaatgctataaactgagaagccaacagatcagcaaaatctatgtttagcagcacaggctggcccccaccatgtccacagtgggctccgaaagttgtctctgttctgtgttatttgacttgtgaattacagattttcaccaaatggcttgattac

SEQ ID NO: 58712 - DNA, 2038 bp, Homo Sapiens
caccatgtctgtccgctactccagcagcagcaagcagttctcttcctcccgcagtggaggaggaggtggcggagggtcctccctaagaatatctagctccaaaggctccctcggcggaggatttagctcaggggggttcagcggcggctcttttagccgcgggagctctggtgggggctgctttgggggctcatcaggtggctatggaggattaggaggttttggtggaggtagctttcgtggaagctatggaagtagcagctttggtgggagttatggaggcagctttggagggggcagtttcggaggtggcagctttggtgggggcagctttggtggaggcggcttcggtggaggcggctttggaggaggctttggtggtggattcggaggagacggcggccttctctctggaaatgaaaaagtaaccatgcagaatctgaatgaccgcttggcctcctacctggacaaagttcgggctctggaagaatcaaactatgagctggaaggcaaaatcaaggagcggtatgaccagcatggcaactcacgtcagggggagcctcgtgactacagcaaatactacaaaaccatcgatgaccttaaaaatcagattctcaacctaacaacagataatgccaacatcctgcttcagatcgacaatgcaaggctggcagctgatgacttcaggctgaagtatgagaatgaggtagctctgcgccagagcgtggaggctgacatcaacggcctgcgtagggtgctggatgagctgaccctgacccaggccgacctagagatgcaaattgagagcctgactgaagagctggcctatctgaagaagaaccgcgaggaggaaatgaaacaccttcgaaatgtgtccaccggtgatgtgaatgtggaaatgaatgctgccccgggtgttgatctgactcaacttctgaataacatgagaaaccaatatgaacaacttgctgaacaaaaccgcaaagatgctgaagcctggttcaatgaaaagagcaaggaactgactacagaaattgataataacattgaacagatatccagctataaatctgagattactgaattgagacgtaatgtacaagctctggagatagaactacagtcccaactggccttgaaacaatccctggaagcctccttggcagaaacagaaggtcgctactgtgtgcagctctcacagattcaggcccagatatccgctctggaagaacagttgcaagagattcgagctgaaaccgagtgccagaatactgaataccaacaactcacggatattaagatccgactggagaatgaaattcaaacctaccgcagcctgctagaaggagagggaagctccggaggcggcggacgcggcggcggaagtttcggcggcggctacggaggcggaagctccggcggcggaagctccggcggcggctacgggggcggaagctccagcggcggccacggcggcagttccagcggcggctacggtggtggcagtttcggcggcggcggcggcggctacgggggcggcagctccggcggcggcagcagctccggcggcggatacggcggcggcagcagctccggcggcggatacggcggcggcagctccagcggaggccacaagtcctcctcttccgggtccgtgggcgagtcttcatctaagggaccaagatactaacaaaaccagagtaatcaagacaattattgaagaggtggcgcccgacggtagagttctttcatctacggttgaatcagaaaccaagaaacactactattaaactgcatgaatctcccttcacacagaccattatttacagatgcatggaaaacaaagtctccaagaaaacacttctgtcttgatggtctatggaaatagaccttgaaaataaggtgtctacaaggtgttttgtggtttccgtatttcttcttttcactttaccagaaagtgttctttaatggaaagaaaaacaactttctgttctcatttactaatgaatttcaataaactttcttactgatgcaaact

SEQ ID NO: 58713 - DNA, 665 bp, Homo Sapiens
  misc_feature (474)..(474): n is a, c, g, or t
atgcagatgatccaagttttttaaagtttacatacttaagcataaataaattaacagatttgtagcaccaataatggtggcatgatggtacacctggaggtaacattatcaagagcttttgttgaaacctttcattttcaatcaggtgctgatttttttccacccaagtcttcaattattactgttctaacactgcaaaaaccattcaagcataaaaaagcatgcaagaggcagtaaaataagcccaaataattgagaattgaacaagaaaacaaaataatttactcttaaaatgacaaaagtaaaattaagacaacctctaaaccaggggtctggtgaacttggatggggaaaaatttaaatctttctttttaccaaacttctacttgaaatataacattcctttaattacgaatatggaaacaagtcacagtaggatcagagtacctgtgactttgtcaccaatagaaatgnacatttagattattacacgtgtagattttcaagatatgaatttgatatagaattttaggaccacatgcgtcttaatttgggtaacggatatggatgtacttgacataaacttttgaaatttcacttattttacatgacaggttctttgcgaactttatattaagttatgcttgaaaacattctattgaggg

SEQ ID NO: 58714 - DNA, 521 bp, Homo Sapiens
ttgcctgtggctcttttatatatatttaaaacacacagtaagaacataagaacatctcaaatcatttagaaggtaaaagggggttatcaaccaaaatctttggaaatttcataaaatttaaatatctgcaaacagtccaaccaaaaacgaaaaaaaaaaaaatcccaacatttggctatggagggcacttcacatgtgaaccaaatggcgttataacattttccttcaactagtcactaaacccaattagaaagaatacaagagcaatattggagacatccccaaataccacgtacttgattagaacattctgttatgaagcgctcagctaccgcgggctttcctttacattgcatacattactttacatttctacagtgcaatgttgaaatagcctccaaattttgcaaagtagattgatgtccattctacaaaaatattaacttacagtacataacactgaataattttaatctgtacatttttttccttccatgatagttgacacacgtcagtttgta

SEQ ID NO: 58715 - DNA, 528 bp, Homo Sapiens
  misc_feature (522)..(522): n is a, c, g, or t
tttaaataaaattgtttatttatgggacacattagaaaagaaaggatcgaaaacgccacaaaaacaacgggatgcattttaaatcggtatgcagaggcatctaaaggattatacaaatctaaaattgcctaaaagattctttacaaaacgcaaatgaaaggctcatgcagcacatgaacctggattgctccttctctgtctcttctttgcctcgatgctttgagtacagtaacccttttgctcagttaccttttctccttgaggctaatgaaaaaggggaagttggacaaatgccttacaaagtgagactctctagtcaaccagcctgcctgctgtaaccacttttactccatggtctaaagctgagcttagagccatcataaagacttaactaatccaagagaaaatactcaaaaacgtactggaaaattgagaatcctcataagagcttatgattcaggactctctaatctttaccaatttattcacatgatactggtgaagcttgaaaattgacagcangagcag

SEQ ID NO: 58716 - DNA, 483 bp, Homo Sapiens
  misc_feature (332)..(332): n is a, c, g, or t
  misc_feature (423)..(423): n is a, c, g, or t
tttagtaatagctttttattcggagtcctcattttccagatagatcacattaaacacagccattaaacaatagcgttgagataaatccatacaatgtatgctgcttttgttgttgtccttgttcaccaatcacttggtgcagctaagaactttatggagtgatgggctgataatggaaatagccaacctgcaaaacactggggccaggaaaagtcagactttaatcaggtctcattcaataatatttagaatcaacacatcttgatagccaaaactctcattcgaattagtgctctgatgaatgctgtctgttgtcaaaagaatataattangactattatgactggggcatatattatggccagacctggtctatctgttgacctcagtaaacttttaactctattagaataacaaacagcntttaacctgggttctaaaaaagcatatgctctattactacatgacttttttatgggtggc

SEQ ID NO: 58717 - DNA, 586 bp, Homo Sapiens
tttttttttttttttttaaagaatgtgctgcttatatgcaatgggcttattattcctgttgttaattggaattggtatacagacattttccaatccttcaggtttcaactggcaaatgccagcagacatacccacagagccagagctcctcaggctcctccacgtccaacggcgtctcacagtcctgaggatgaggacctgggtgaggggagcacgggagacacagccatcaaggcatccacctccaggacagacaccagccaagaaccccctcagggcaaggcctctcacaagtccaactccacggattccaccgtaagtgctgtcaactggatgcgcatttacaaaatctgagttttctcaaagaagctgaagctttccgtgtcctcagtgattctggactcccagcgccgtaccactccctgccagccacacagggggacccacaggaagcaggccttccccgtggcgggccttgctgctatccgcgctcctttctgtgcagtcgtccctgacggggaagggttgagcccagccaagtggattcctggctgcaagacaaaggtgtgcatgggaaaggggccaa

SEQ ID NO: 58718 - DNA, 521 bp, Homo Sapiens
  misc_feature (277)..(277): n is a, c, g, or t
  misc_feature (332)..(332): n is a, c, g, or t
  misc_feature (365)..(365): n is a, c, g, or t
  misc_feature (376)..(376): n is a, c, g, or t
  misc_feature (409)..(409): n is a, c, g, or t
  misc_feature (459)..(459): n is a, c, g, or t
  misc_feature (497)..(497): n is a, c, g, or t
ttcaacaaaaatgcggattcagaaaagcacccaggaaggttgaacctcgaagatcagacccagggacaagtggtgaagcatacaagagaagtgctttgattcctcctgtggaagaaacagtcttttatccttctccctatcctataaggagtctcataaaacctttattttttactgttgggtttacaggctgtgcatttggatcagctgctatttggcaatatgaatcactgaaatccagggtccagagttattttgatggtataaaagctgattnggtttggatagcataatgaccacaaaaagaaggagactttcaagaaaggagattnaacaagtggtggaataacctaagtgatggccancggactgtgancaggtattatagctgcaaatgtccttgtaatcnggtttatggagagtaccttctctgcagcggacaatgatcagatatttcanatcgaatccagcctccaaggtcccttgttctcccatgntgctgtcaacattcagtcattctc

SEQ ID NO: 58719 - DNA, 534 bp, Homo Sapiens
tttgaatttaaaatactttttatatgtttactaacattaaactattttcaatgcaggaaataaatatttccccaaagaggaatcccccctcaattactttctttcagacttaacaaattggagtagatgtggttttgctcattcttttatctgctggcaactattttaagtctcctgtgcaaggcagattccgatgacctcgggaaagtcacaggacctcagtttcttcaatggtaaaagcaaaggcagtggtttctaccgtcctttctcactgcaccattcagcgtcagtgccctcatgagaaacacacccaaagcccagtgtgctctaccccaaaacttgtgaaatttctagagtctcaaaaaagtgaatatgtttaaggcagtataataaaagccaggtggacgacagttcctaaagttaggctggtagtggcgtgaacaggggtcttttgggccaccctgagacccgccccacggggcttctcgatccacgtcttggcttctcgctccactttcacagaacgtactgaat

SEQ ID NO: 58720 - DNA, 539 bp, Homo Sapiens
  misc_feature (493)..(493): n is a, c, g, or t
tgcggccgctgggacccagccaggtaccggtccggctcggccctgcccctttccggccgctctcactccttccctcggcctcgagttcctcgtgggcccgtgggggccgccgcggggtcggggctgcgaggcagcgcccgccgttccatggtaagcggtgctacgggacgttcggaaggaaacctcgctagagcaggggacgcctgggctcctggctgaccacggggcctttgcacggccagggctttgcgaccgcagtgtcttccttctgtccccggtcgtgcgccgtgcccctcagcgcggctcacgtttcggaacacgtctgcctttcatgcctcccgaagagcctccccgcatcccgtgccccctgctcgctgctgccgctgacccttgggcgctgcgctggtccagagcgtgttgtcctctgacgccgtcagaacctgagctccctgcgagctgggactccgccgtgtcttcattgcctccagtgcanagcaactgcttgcaagagaacaaaagtgtgttcaggtgcacagagt

SEQ ID NO: 58721 - DNA, 529 bp, Homo Sapiens
tattttgtaatcaactgaaagaaggcagaaggagtcgatgggcctcttaggcgagaaaccttacaagcataggaccaaggcagaaaaggtccagagggttcatggtcctccgttccacctgaatccagctagagagcgagccagggggataggtgtgcccctcgtcgcccgtgcgctgaggcactgtcacgcaaagagacattcaccttccacgtcaacgcacctttaagggcgagacggtccgccgtgcccaagaggaacgggatgacattcaactgggacttgcctcaccttggcttgggggacctcgagagcggtcccgtgggggcagtgttactcgtggtggtagaagtggagggcgtgtccgggtacttgagttcatgggcatctctcccgccgcctctcagcctatctgcaccatgtctcacacgttcagttgcagctcttaccgttttgaaggcgcacgtgggcaagaagtcctgggcagcacaagaaagtcaatcacgttgagacagagagagcaggagag

SEQ ID NO: 58722 - DNA, 576 bp, Homo Sapiens
tttttgtccattttttattgagatacaacttacatagcatcagattcacagaattcaccttttaacacgtaaaattcagtggcatttagtgcattcacagtgtggtgtggctgcctccactgtaaccccagaacatttcatcccaggagcccatcccgtgctggtgtcccttctccccagcagcaggaggagggtgaccacgtgtgtggggtcccaaggaggccgtgttctggttgtttgccgacttcggcagcttctgacacaggcctcttcattctcctttatcttcatttgagttaacagcacacaggtaagagtcagagacatttctaggtctttgtaggtgtgcacgtgtgacatgtcttatcaatgcagacccaccatgtgtgcaagggggggcctgggccctgctggttgggtgtccagctccttgcttttccctctttctgttttccccctgcgtccttccagctgcagctcccatgagctctagaggtcacagctgcgttcagctgatggggaggagggcaaacccctcccctaagggcccttctccaaatcccactgaaacccact

SEQ ID NO: 58723 - DNA, 465 bp, Homo Sapiens
ttaagttttaattaaatttttatttgaccaagaaaaaactgtctagaattgcctgacatttaaaatccacttaaagcagattagcaacttcaagcatcacaattattcagcataaagagcctttgttgaaacatctttctcatttatttagaagaaaacatctagaacagaaccaagcaaaacttttgtatttttgtaaaaaatctcaattcctgaaactactataaacaatctactgaaactgtattcagcaagggacagatttacctcaaggccatgttcacctgcaacctgctgataagtctgttaaaaaacaaagcaaaaaaaagagtttttaaaaattagaccactgtagccacaatccctaacactggacagttaaaacaaaagttatcaaaatctgttcttttcttagctttacctgtatcactttataactcctgagaaagtcattcacataagctg

SEQ ID NO: 58724 - DNA, 604 bp, Homo Sapiens
  misc_feature (534)..(534): n is a, c, g, or t
tcagataatcaaaataatttttatttggttgtagaatgttgtagtacataaagcaaaatgtgtctgcaggatactccaaatttaccaacttcaaacaaaataatgcacagtgaagaattagaaaattatcaaccttactcaatacatggaagtattccttaatcttcatcattttcattaaacaaaataatattttggatgagttcaacatttctatcctatgctttatgtttagtgccttccctgaattggaaaaaatgaggtgttttatttaaatttaacactggtctaagggagatatagaattaaactaaacaagaatcggttatcacaacctcacaacatatatcaaagtattgagattgttggtttactgactgtcacttttcactggatattaaatatcctgagggctacaactgtattttttaacctgtcccagtacctcaacaaaattttcactgaatgtatgaataaattatgttaacaaaaagttaacaataaaagtataatgaagatccctttaattaattntaaaatctgaaaggaaaactggagtcacaaaacatatgttcaaatcttaattcatcacaaattttgtgat

SEQ ID NO: 58725 - DNA, 1628 bp, Homo Sapiens
gaattttctttattaatgaccccaaccgtatttctttagatacaggagttttgaactcaaatacttaggagaaaacaagttatgactgcattatcctgcaactcattaccagtaatatattgcaaagcgaaacagcttggaaaagagggtgggagaaaagggaagtgagggagggaagataaagaaaaggaattaagttgatcaagtggaattctttttttttttttttttaattcttgggaactatattgtctgaaaaattgtctcaatttttcaagccttttgttagcattaatgcttggttttccatagtaatgatgggttcgttcctctgcatatcttctcttttatagacagatgcattccagaagcccgttccattggaacagcaccctgactatgcggaatacatcttccatccaatggacctttgtacattggaaaaggttggcctccgtcaaagaacctcaccattctagcccacagttgagatgcctaaggctcttccctcactgcctatgctctatcacaagttggacataacaatcttaaattgtttctctatattttcattgctcctttatttggatagaagaactcttgattctctaacgtctttcctttgtaacattcttccaagattgcagtggaatgttgaaattctttggtaatacttttgcgatgattctagctttttacctgcaaaagccatagcttctaagagttagtgatttgattgacttgagcgttacctcctctttctttcggaggtgctaatgagagcagcaggaaggaagaagagaaaattaagtgtctgggaagcctccagattagcaataaagatgtggcttcttagaatttgacttactctactgattaggttttttcttgaatgcctgaaggttttaaaagttcatgctaaaattccacgctgaaaattacacttggaacactgtagattgtgcacattattctgatgctgattttccaactatttgcagcaaaatatgggcagtgaaatgcatccacgaggaagaaacattacttcatattgtcttccccaataactcccaaaccataaatccagtctgtttttaggaaattgcacataccttcatggtgtggtggaaaaaaggaggcattcaaaagagatggagttggaaacctgactttatattaattaagttaagagctgtggaactttagatacattccttaacattactgtatctcagtttgcctttctgtaaaatgggtatgataataagtacttcattaaattattgtgaggtttgtgtgagaccatatgactaataataaataatgtataaatatatgaaataccctgtttggccgggcgcggtggctcaagcctgtaatcccagcagtttgggaggctgaggcgggcggatcatctgaggtcaggagttcgagaccagcctgaccaacatggagaaaccccgtctctactaaaaatacaaaatgagctgggcatggtagcacacgcctgtaattccagctattcaggaggctgaggcaggggaattgcttgaacccgggaggtggaggttgcagtgagccgagatcacgccattgcactccaacctgggcaataagagcaaaactcc

SEQ ID NO: 58726 - DNA, 508 bp, Homo Sapiens
  misc_feature (503)..(503): n is a, c, g, or t
aagcacaagcaaaaaactacctttatatatgatgttattcaaatacatggataagataacacattttatgatgtaaaaagtaatatttaaaaattaaaaggcaagtctttctggtattcagaagtctgaagcaaccactgtccagctctttaaaaagagcacattccattctggtgcacacaaatgttcctttaaaaataaaataaaaaagtgtaagagtacatttcaagggaatccctgcctctcccttggctcgctggcaaatgattcacaaccaaaacatttctgggatatgtgacttaaggaataaaaaaactcagtgttttataaaagggaatggcaggatgaggaaatgatttatcaagatacaattttactaataattacttctcaaataacttaaaaatgttttataacaaaaaatcaaaatgaaacaaaacttggtagttgaatataagtattttcaactgttacaatacttgaggagatttttcggtctaatntctca

SEQ ID NO: 58727 - DNA, 531 bp, Homo Sapiens
tttttttttttttttttaaactcttgtttttactcaaccaaagcaatgtagtaacttattacataaccagtgctttctaatttagtagtaaaatacagaaagggaaactgaaaaaaatcaggcaaatagaggaatggagagggcaactatatcaaacagtccccactaaacacgttttatagggtcttagttaattaagcacagacacatggcatcagaatatgtgcagcagaattaaaaaaaaaaaaaccttactcttttcaatattttcatgaagaaacatttgcaacattggacagttaagtctatgaaaaatgacttcaaactatttcctacctacttatactaatgattctgagcaacaagtgatcaattcataaactatccttaagactcaatcagttcacaagtaaaacaaaacatccattaaaataatgtggctctattcattttaagttcaaatcaaatgttgcagttttaaaacatagttgattgtccttgttttttagcatcctatgatgtcagcaaaag

SEQ ID NO: 58728 - DNA, 426 bp, Homo Sapiens
ttttacaacaaaaacatcttataggctttattacttcatcactaacaagggactccaaggaatgtgaaacagatcatgatttgcacaaacagtacatttttaagcttcagaagataaagcattccagacgactctgtcgaaatacatcaataaatttaaagcagctacatctaaattgtgaggataaaatacatctaccaacaggaaatcaatgtcttaagcatacaaatgcaaaccttaaaataatttaaatgtaaaatatacaactgcaaatattaatcacagtaacaaacacaaaatagaagtatatattaagagtattccaggatttctgttattacagatttgatttcataaatgcaggaactctaaccatcaagtaaaggttttgataaatcacatcaaaatttcctaaaatgtcaagtg

SEQ ID NO: 58729 - DNA, 502 bp, Homo Sapiens
tttttttttttttttaaatacttacagctttattaggagagggctgtggtcacctcagcagccagctcccttgtatacacagtatacacagcccagccagcacccaggtccttccatccttctgcagtacatggagtgcaaaagaaccaaacacaacggcggggagggagggtctaccaatgagtgtcagtgtctagtgcttccgggagccaactgccaggctagggacactcaagtccctcaaactgtcatcagctcctgccagaccccactccagcatgtcgagtgtttgggccagactcctccaatcagtgcacgcgatgggcagaggaggctagggaatcctgagcccaaagctgtattggtccatccccctcaagaagttgttggagctttcagaacgttcctcttcttgtgtagacatgagataccgctgtaactttactccatcaccagaaacctgtgccttgagtctagtctctgctcagccctcgagagcatg

SEQ ID NO: 58730 - DNA, 467 bp, Homo Sapiens
  misc_feature (375)..(376): n is a, c, g, or t
  misc_feature (408)..(408): n is a, c, g, or t
  misc_feature (458)..(458): n is a, c, g, or t
  misc_feature (464)..(464): n is a, c, g, or t
tagattaaaccgtgtaagttttttattgtttttgaaaaatcaagtctttatcattttactaggaactatttacagaataaactaatgagattcttcctgaggtaaaaatactttttggaaaaacttctccttgatgaaatttcacttaaaacatcacttccatccgtgaagtatttctttaagatatttttggtcccttccttttatgtggaatcgtcaattcaaattttaaaggagactttgagatgtttttcatctattattttaaaaatgttgaaggggtttttaattctgccttcaacagagatggacacacctctgattatgatgtaaaactgaataagttactctgacaggctttcttttctgcagcgnntaacccatcattattaataaggattgaattcntttactccatgcacaatctatattccctgctttaccaagaatagaaatcnaattcncac

SEQ ID NO: 58731 - DNA, 3159 bp, Homo Sapiens
tatagaatttcaaaatgaaattatttgcccgacaagaaggcatcattagttagacttgtttcccctgtagcccgattgaaattctcagtgttaagtttaggacccaaacaccagctgggacgtaagagcaggaccgaatcaaccttgaataaactgtatatagaaaacaattgttagttgattaagtagacattggatgtttgttagaaaggaatgttagttgtaagtgacatgttaagatttatacaattgtcaaaaacttttaggaaagattccagaatgcttttgataaaatttatcgattatggattcacagtgtgataattaagtagggatgttgaagtcttgccaagttttcctggttcccttctcaaactttatcttcccatttctagccctgtctctctatcttacaggcatctacacctcagcaagtcagaaactaaacatcatctgtctctccctgtcttcagaaccccaaccctcataatctccttccagcttccttatttcccttaccaggactggcattttctgggcttggaatttctcggtcatcctctttttttttgttcctcgtgctgttgtcctcgtctcccaacccctaaagcctagtaggtccagtgtcaatgcattaaccacttctgttctgatttccaccacccaagtggaggccttcataacctctcagacgtcacggccatgatgccagttacattacgcctagttaatcttcattcagactggaaggacctgcccccagttgtttctttctgaatagattctactctccttcaacacttccaaagtctcctgccccaaagaggcttagttagtcctgtggctggatgtgactccaacttccttttttgtaccatcacatctttcatatctttctggcatctgccatacatcataagaggctttggccactgtcctccactgaatagcccattacagctagcacctaatagttactcaggaaataaatacatgtttaacaggccaggtcgtagagattatttttctttctctgccttttcatgtgctgctttcagaacagagggctggattggatagattagtatgatctatcctggagattcatttcttgcattaagagcttattttgtgtgatattatttataatccctgactatgtcaattataaacttttaaattatgtcttatatttgaagttcttacctacatatcagaggaaaatataatgtttatttctaggtggtaaaacaatcttctggattcttttttctttacttgtaaattatcatttaacaagtctatattgaatgccgataattttctggaacaaaacagactacattcccttggtaaagccagacattaaacagatactttcaagcaacagcatgccatgctcagatttaagtttgaaaaatattctagctgcaatggatagcctagcaattttcaaagtttagagaagttattaatattagccctttgtagtactcctgataaatgaataacaccctggactttcaaatagtggcactgggaaaaaagtaagtagaattgagagatggtgaagagataaagtgagcaggacttaacaattgctggactatgggatgagggagcgtagagtcaaggatggctctcagtccctaggtctccaggtctaggaagatggtgttacctttcactaagggagagaactgtaagaactgctgtgagaggaccacaggagtccagttttagcgctgaatctcaggtgactgaaaagcatccaaataggaatgtcagcaaggtaatggaatatatagttctcagagaagtaacacactgtacttgagatgtacacaagttaaaggcaaacattgtatatgaaaagtgatcaaaactacatgcttcaagaaattaaaccttgaagaactcaacagttaatgtcatatatagaaaggcaagtcagttaagagtgtaaatagaaacgggtaaatacagaggagaaaaacagtaagcatggactgtcctagaattcagtggcagagcatactgcaagaaagctgatgtggtcaataatatcaaatgccgctgagatcacataagtacagaatcatgaccttaatggtttgacagtttggaagcaccctggcaacaagccatttcagtggaatggtagaaatggaaaccacgctgggttgagaagtgagtggatgtgaaaatatggggcctctgaatggaggtaacccttgaaaaattccactgtggagaagaaaggagagagagagggctggaatttggaatgaaaggagatatttgggattattttagtaagaaaacagaggtgtcatgacctcagtgtaaccctattagctgcaaaaaattcttcatgggcttgagatggagttagccatattcattattgaaaactatgttctgcacttatacattgttggttggagtgtaaattagttcaaccgctgtggaagacagggtgggtgtttcctcaaaaacctaaagacagaaataccatttgacccagcaatcccataactgggtatgtacccaaaggaatataaattgttctactataaaaacacatgcacacacatgttcactgcaacactatttacaatagcaaagacactggatcagtctaaatgcccatcattgatagaatggataaagaaaatgtggtagaggtacaccatggaatactatgcagccataaaaaagaatgagatcatgtccttttgcaggaacttggatacagctggaggccattatccttagcaaactaatgcagcaacagaaaaccaaataccacatgttctcatttataggtaggagttaaatgatgagaacacatggacatgtagaagggaacaaaatacactgggggctattggagggtgaagggtgaaaggaggaagaggatcaggaaaaataatgagtaccaggcttaatacatgggcgatgaaataatctgtatgacaagcctctctgacacagtttacctatgtaacaaacctgcacagttacccctgaactttaaaaaaaactatgttctatcaaaacctgcctctcatttatgtattaggaatcttgtgacaacggaacagttgaaaaattaaaataaaaattgcctgaaaatgcaaaaaaaaaaaaaaaaaa

SEQ ID NO: 58732 - DNA, 4246 bp, Homo Sapiens
gatgagattgatgattctttctcctggaaaacctttcatcacagagattcatctcagcattaaagggcagtatttaaagtcagttggcaagcagtggaataagatttttgtaaagaaaccttgtgcagcatggattctctaccagatgaattttttgtgaggcatcctgctgtggaggatcagaggaaggaagaaactgagaataagctagaaaaatcatctggtcaactgaacaaacaggaaaatgacatacctactgatcttgtccctgttaacctactattagaagtgaagaagttattaaatgcaattaatactctaccaaaaggtgtggttcctcacattaagaagttcttacaagaagatttttccttccaaactatgcagagagaagttgcagctaacagccagaatggtgaggaaattgttcctgctttgactttacgtttcttgattacacagctagaagcagcacttaggaacattcaagctggcaattataccgcacaccagattaatattggttattatttgacattactgtttttatatggagtagcactcactgaaagaggaaagaaagaggattatacagaagctgagaataaatttctggtgatgaagatgatgatccaagaaaatgaaatttgtgaaaactttatgtctttagtttattttggacgtggtttactgcgatgtgctcaaaagagatataatggaggactgctagaatttcataaaagcttacaagaaattggagacaaaaatgaccattggtttgacatagatcctacagaagatgaagatttacctacaacttttaaagatcttcttaataattttatcaagacaactgaaagcaatataatgaagcagacgatttgtagttacctagattgtgaacgatcttgtgaagctgacattttgaagaacaccagttataagggattttttcagttaatgtgcagtaaaagttgctgtgtttatttccataaaatttgctggaaaaagttcaagaatttaaagtatccaggtgaaaatgatcagagttttagtgggaaaaaatgtttgaaggaaggatgtacaggtgacatggtaaggatgctgcaatgtgatgtacctggaattgttaaaattttgtttgaagttgtgagaaaggatgaatatatcaccattgaaaatttaggagcaagttatagaaagttgatatctctgaaaataactgatactgatataagaccgaagatcagtttaaaatttaatacaaaagatgaaatgcctatcttcaagcttgattataattatttctatcatctgcttcatataattattatttctggtactgacattgttcgacaaatatttgatgaggctatgccacctcctcttttgaaaaaagagcttcttatacacaagaatgtgctggaatcctactacaaccatctttggaccaatcatcctttgggtggatcatggcatctgctttatcctcctaacaaggagttaccgcaatccaaacagtttgacttatgcctcctgttagctcttataaaacatttaaatgtgttccctgcacccaaaaaaggatggaatatggaaccgccatcttctgacatctctaaatctgcagacatcctgagactgtgcaaatacagggatatcctccttagtgagattttgatgaatggtctcactgagtcacagttcaattcaatttggaaaaaagtttcagatattcttctgcgccttgggatgatgcaagaggatattgacaaagtgaaggagaatcccattgagaatatctcccttgattaccatcagctatctgtctacctaggcataccagtaccagaaatcatacagaggatgttatcctgctatcaacaaggaattgctctacagtcaataacaggcagtcagcgtattgaaatagaagagttacagaatgaggaagaagaactaagtccacctctcatggagtacaatataaatgtgaaatcacaccctgagatacagtttgcagaaattaataaagatgggacctcaatacccagtgaatcttcaacagaatctcttaaagatctccaggaagttaagagtaaacaaaggaaaaagaagaagactaagaataaaaagaataaagactcaaaagaagaccaagtcccatatgtggtagaaaaggaagagcagttgaggaaagaacaagcaaatccacactcagtcagtagacttataaaagatgatgcaagtgatgttcaagaggattctgcaatggaagacaagttctatagcctggatgaattgcatattctggacatgatagagcagggctcagctggcaaagtaactacagactatggagaaactgaaaaggaaaggcttgctcgtcaaaggcagctttataaattgcactatcagtgtgaagatttcaaaagacagttgagaacagtgacttttcggtggcaagaaaaccaaatgcagattaaaaagaaagacaaaattatcgcatctcttaatcaacaagttgcttttggaatcaataaggtttccaaattacagcgtcaaatccatgctaaagataatgaaatcaagaaccttaaagagcaactttctatgaaaagatctcagtgggaaatggaaaaacataatctggaaagcacaatgaaaacatacgtaagcaaactgaacgcagaaactagcagagctttaacagccgaggtgtatttcttacagtgtcgtagggattttggtttgcttcatctagagcagactgaaaaggaatgtctcaatcagcttgccagggtgactcacatggcagcaagcaacctagaatcacttcaattaaaggctgcggtagacagttggaatgccattgtggcagatgttagaaacaagattgcattcctcaggacacagtacaatgaacaaataaacaaagtcaagcaaggatttgccttgagtaccttgcctccagtccagcttcctcctccaccacccagtcctgagatactgatgcagcagttcttaggaagaccccttgtgaaagaatctttctttagacccatacttactgttcctcaaatgcctgcagtttgcccgggagtcgtctctgcaactggccaacctagagcccccctgatgactggcatagcctgggctctgccagcgcctgtgggagacgctgtgcctcccagtgcaggtctgcggagtgatccctccatcatgaattgggagagaattacagacaggctgaaaactgcctttccacagcaaaccagaaaggaacttacagatttcttacggaaattgaaggatgcttatggaaaatccttgtctgaactgacatttgatgaaattgtttgcaagatttcccagtttattgaccccaaaaagtctcagagtcaaggaaaatcagtgtcaaatgttaattgtgtttcacctagtcattctccatcacagcctgatgctgcccagcccccaaaaccagcctggaggccactcacttcacagggtcctgccacatgggaaggagccagtaatccagatgaggaagaggaagaagaagagccttgtgtgatctgtcatgagaatctgtctccagaaaatctttcagttttgccttgcgctcacaaattccatgctcagtgcattagaccatggttgatgcaacaggggacatgtccaacgtgcagactccacgttttgctaccagaagaattccctggtcaccccagccggcagttgcccaagatctgatacaaggtcggggtgtctatgcaaaggaagctcagttttcttttattatgagctgcttgtttgagtggtgtaaaactatgtgctcttcaatatagtgctaaagaagccagctaattttatcaaagcagcagccaaagaagtcaggacaaatcttcaggacttgtgaaatgaactgaaagagcttgaagcagatggaattttaatagttacactatatatgctcttagtaggtttttttcttgtagtggaaacataactgttagcatatttcttaggatgttttttcttgtctttttaaattcttatttcactcatcctttactctcccctcaagtattctacactttaatttcctgaaataaatttaaggaaaagggaaatagtaaagaagtaggaatgggtgcagcacaccagcatggcacatgaatacacatgtaactaacctgcacattgtgcacatgtaccctaaaacttaaagtataataataat

SEQ ID NO: 58733 - DNA, 600 bp, Homo Sapiens
ctctttgtccttttagacaagtcaattatttcaagcctaagttatcaggtctccaggagcggcgcaattttgttcctacctccacccttccaccccttccccgcgccaggacccttagagtttcccctttccctcttcttcacgcccccgtgccactgctctcctgacaagaggccatcaggcagctctcgcatgggccctggggcccttaccaaggtgggctgccgccatgcggtcaaggatctgttccttttgttgttttgttttcagccaaaactagaacagagagagaagccaggatcaactcacaaacagatacaaagcaaagagacagagagacagcgatttagaggccggtcaccagaaagatggcgtcagggtgggaggatgccccggatggcaaggcccctaaatggatggaaccaagtgtcagtcactctctcacgcttgggaagaaatgtcggttgaatggcgttcacgtggacactgggttgggtagatgctgtccaatcagtcccagccattgtccttgatcatgtgtgctagttcaatgatgtatttgccttctttatatttctggctgctttcaaaagcatgttc

SEQ ID NO: 58734 - DNA, 445 bp, Homo Sapiens
catggcacaaataaataatctttaatttcaataaatagctccccatcacaccagacattatgctgtggaaaaagatacagaagcatccaacagagagagaggaaagggagagagagagagagatctattctaactacactaattccttagcacgagagacgtgacattcgttcacagacaaacacagaaagatcctcagagtatgattaaggaagaagatcatcatggatggggtgtgatagccattttaatccatatatcaggtctttgtatgtctttcgtgggtcacaatcaccatgattcggtcaaaaaatgttacttttgctctatcatatcctatttacacacacacacacacacacacacacacacacactacttttatccaaagtgggatctctgacagacaggaggacactggttggactctcactggacaggagag

SEQ ID NO: 58735 - DNA, 543 bp, Homo Sapiens
aatttggaacacaaatgctttatttaagggtgcatcacaattcccgtgtggtgagcaaaaaataaaataaaggagcagatcgtagcacaccattcccactggccaagtggttgaaccctgcatccaagacccagtgagcagccaagtgaggtgcaacctctgggcctctcactcgtgactccaacagaattagcacattgcccttgtgcatggggccttttacattgcagattttggagcagcaagacaatgtatatctgttcgtaactcttgttcttccctcctgatttttaaaactgcgtaattataaaactatgttgatggacatataattattataaagatgtagtttgtgacaataacagcatgggcagaatgaaggcatatagagcaaatttttcattactgaaattaagttgagattaatctgaaacagataaaacagactagttttacaacctcctgtaataaaaacgctgtcttttaaaacaaattatctattgcacttttttgtttttggtgtcacagctatgaaagctttgc

SEQ ID NO: 58736 - DNA, 2192 bp, Homo Sapiens
cccccgcaccccggggccaaggaaagggatcgcggtctggactccccggggagttcccttgatgaggggaagggcaggtttggggacggcgaggacacgcggcgaccggagagaggctacctgacccgcgcagcccggactcccttcccttcccttccagggacgcctggtttccccccaagcgaaccgggatgggaagtgacttcaatgagattgaacttcagctggattgaaagagaggctagaagttccgcttgccagcagcctccttagtagagcggaatgagtaatacccacacggtgcttgtctcacttccccatccgcacccggccctcacctgctgtcacctcggcctcccacacccggtccgcgctccccgccctcttcctcgcgtagaaccgtgggatcctaggtggcaggactcagagctaaggtatccacaggccatgaattccttcctaaatgagcggtcatcgccgtgcaggaccttaaggcaagaagcatcggctgacagatgtgatctctgaacctgatagattgctgattttatcttattttatccttgacttggtacaagttttgggatttctgaaaagaccatacagataaccacaaatatcaagaaagtcgtcttcagtattaagtagaatttagatttaggtttccttcctgcttcccacctccttcgaataaggaaacgtctttgggaccaactttatggaataaataagctgagctgtatttcaagtaatatagttataaattaacaatgtagcagttattgatagagaaattgagaaaactgaaacgtgaccggagtattggaaataacgtagtacatcacctagcacaatgacacatagtaggtgctcaataaatttatgcttataatttttgtcacttctatggcaggatttttttattaggttaaaattatcttttaaacaccttccggaattttagaatattcattaataatgtcttcaaacctttcaactgaaataaatttacagctgaagtctgatgatttaaagttagaaagtttaatcttgaatataaatgaacattttctctcccacattttcttgggcattttgagaagtaaatgcgttatttattggtccatgaaatgtgactgtaaatattctttgctatacattatgtctatatatctgcattcatcctcaatgccaaaactagaatcattagtcttaatgatcattttaagtacaggcagtcctcgctttccttgataccatgttaaccgaaacttgtgtatgtcaacacggtgtccttgctttgcttggttaagtgtgagttcttcctccctttttttaagagttgtacaatgtttttcagtcgcctaccgaatcaggtcatagactatggaattgaccccaccccaccaacatttttacagctaccctgatttctgaccagaaaggaaaaaaaaactttccagctctatcacacattttacctactcttaaacttaggaggtattacaaatagcattttctcatgttctctttctggcctgtacctccctgctaagcttccttcagtgttcatcctcacctcatagagagatgaagtgaagagacaaacagaagtcattttcttccttactttagtggtttctggtttagttagtttgggccaaactgtggacaagtaccttttcaggtaacttttttttcttatttctatgtcctcaacacctagtggagtacgtagccaatagtagatgcttaataaacatttcttaaattaatattgttgaccttttctgaccctgttcttgacagtaaggtacataatctgccttcatccctttagtccttaggaacagataaagtcatggatatgaaagtgatcactgtcattaatatccacattaaaattgctcttgattttagtttctccataatcattttccctaaacaatgaactctgttcacctttttttttaaaatatgcacagtgaatattactggtagcccaaatcttctaacataaaatttccattttgtaaaagcttctgataagcatatatgttatgaattgaatgtttgattattatactttaatattcttgaaaatattgatacctggactggaaagaaaacagacaaaagtaaatctcagaataaattactgctttaaacatgaaaaaaaaaaaaaaaaaaaa

SEQ ID NO: 58737 - DNA, 537 bp, Homo Sapiens
gcttcagtctctttattcgagagaaactttgtcctcaaagggaagaagtaagaagaccccctgctgaattatttcacagtagaaatagtagattcctctctggtcctagataccacccccagcagcaattttccaaacccaggatttggtaaccttgggcctagggcatcccagccccaacaagagcataacatgttagggaggaacgagagagggaggcagggcaggagttgaggaatcaccgaccactttcatccaaaccagacaccacctcgttttgcagagtcctcaggggaagctctcaaaacctcagttccctcatctgtgaaatgggagacatctgggcaagatgagtttgaaggtcccttatggttttcacgattggattctatcttctcccacccatccaggctcccaaccccaccagagctgactctggggtcgaatttgagccaatcccctccctttgtcagtgcccagtttcctcaccccttctgaaccttgctgccagaatctctgtgcctcttctctggagaa

SEQ ID NO: 58738 - DNA, 574 bp, Homo Sapiens
  misc_feature (513)..(513): n is a, c, g, or t
ttttttttgactaagagtgtttggttgcttttttgtcacaagtaacttggaaaatagaagcagaatagtaaaggttctattcagcaacatagttcatggattttgtggaggttctattcagtaatatggttcatggatttagtggtgactgataagattttatttttgaaggaaaaattgcttatactaagtccagagacatgcaggtgagcccttttgtcaggctgcaaatcatgacatgccgatggttgtttattttgtttttaggtgtgcattctttttcttcttagcaattcctttatgatcaccttcccttcttgtttcactccctcccgctctctcaaaaggaacttgggaaacttgtgaaacccaggaaaacctttagtcttatacctcaactacctttcagtcctgtctgggttttaaataagtgaagtagaagaaattgagtattttctgacataagaatatattatcaatacagttttatgcagtaagctctccttaccatanatgtttcttggttgacaacatctaagacaatattagtgggatgaagaaagaaaagcagggt

SEQ ID NO: 58739 - DNA, 568 bp, Homo Sapiens
  misc_feature (449)..(449): n is a, c, g, or t
  misc_feature (470)..(470): n is a, c, g, or t
  misc_feature (501)..(501): n is a, c, g, or t
  misc_feature (519)..(520): n is a, c, g, or t
  misc_feature (538)..(538): n is a, c, g, or t
  misc_feature (547)..(547): n is a, c, g, or t
  misc_feature (549)..(549): n is a, c, g, or t
ggaaaagatgagaaacgaggctttatttgctccaacagatattaaaagtatgagaaccacaaccatgaaaacaacagaagctgatgtgagaaacaacactaaaattaaacagtgcagacacaggtccagcgacaatgattttagcactcatacaggtggcatttcggtcagtgcatgatgattcagtgggccgaagcatttcagatccttgtctcatatcacacctcgaaatacattcctggtcaattaaacactgaaacgtactcagagaaaaagagatgaaagtgtaaataatctttgtgtgagaaaggactttccaagcatgacctcaaaggctagagcataagagtcttcgttttaaaatgtgcaggcatttctgatttaaaaatgtaaactatagcaggttacatcaaaaaggaaaaaaatacagttaaatggcaaatgatgcntgaggaataatgatttacagngaatatgttcaggtttgctggcttaatatgnaccaatatcttacagccnnccaaatttttcaaaactnaaagccttntngatgagaccagaatgggca

SEQ ID NO: 58740 - DNA, 491 bp, Homo Sapiens
ttattcaatcaatttttattgagcacatcctacgcacaagacacaatattaggtacagaaaagctataaagataaatgtgacacattctttaccattaataataatatatattatctaaaatttaatttgagctaatatataactgacaatgaaatatttggaccacctaaaacaaggataaattattctgtgacaagtttatattcttgcattatgcaaaaatgattctaaaataaactatttttttcccagaaattgtatgagctatacattgctatgtaacaaattgccccaaatttagcggcgtactacaacaaacacttcttatctcatacagtttctgaggatgaggaatccagaatggtttccttgggttttctggctgaaggtctctcatgaaattacggtcaagctattagacagggctgcagtcatctgaaggcttgactgaggctggaagatctacttctaaaatggctgttgacaggag

SEQ ID NO: 58741 - DNA, 494 bp, Homo Sapiens
gagcggtgagcataatttattcatgtacttgcatagaaatttgttatacagacattaggaaaaagtataagtgctccctgcaaatattcaattttaggaaaatagtaacaaaaatagcttgagaaaattaatatcatttaaattcgacaatgtacaatgttcccatttacagatttgtgtgagcacaagaagctcctgcatggtagatccctgttctgaagatcgactcaggtccattttagaggcctctggttctctcagccacagcctaaattcttcactgctgatgatctttggttatgcttgcttttttttccccacaattcttctttcacacgttccctaacaagaaagggttcagttcaaacactgaaaattgagcttctccacagcaatatccataaacctatgacagttgcaaattcatagttccaaaggctttggtcactgggttttaaaattggaacgatatgtttgcttgcttggtttcctga

SEQ ID NO: 58742 - DNA, 577 bp, Homo Sapiens
  misc_feature (393)..(393): n is a, c, g, or t
  misc_feature (405)..(405): n is a, c, g, or t
  misc_feature (444)..(444): n is a, c, g, or t
  misc_feature (462)..(462): n is a, c, g, or t
  misc_feature (474)..(474): n is a, c, g, or t
  misc_feature (479)..(479): n is a, c, g, or t
  misc_feature (507)..(507): n is a, c, g, or t
  misc_feature (520)..(520): n is a, c, g, or t
  misc_feature (525)..(525): n is a, c, g, or t
  misc_feature (532)..(532): n is a, c, g, or t
  misc_feature (548)..(548): n is a, c, g, or t
  misc_feature (559)..(559): n is a, c, g, or t
  misc_feature (567)..(567): n is a, c, g, or t
ttatggagtgataaaatttaataaggttttcattctgtactcaatttttattcttgtttgtattctaacaaatgtactttctatatttatatatttatctgtctacattcagagcctgaatatatttacttattgaccagtagaatgcatacacttaaaactttaataattttgaaacaagtcaaattacataactgtaacatacagcagatcaccaattcacaatcatctctaccttggttcatctttacacaagtacttgaattccctttaatgtctctttagaagttcataaactatatctagatctctgctacaattttccacaattaattggaggttatacccagataggtaacttaataccggtatattccccccaattttcccagnagtagctaggcntccatggcccatttccaaaatagcctattccctaattcnccaaatggccttaatccntgggcccttcanctacnggattggaccccggtaataaatcccacnggggaatattggnaaggnatttggnaggaggaaggtttagncgggttaggangtggcggnccccgggaat

SEQ ID NO: 58743 - DNA, 538 bp, Homo Sapiens
  misc_feature (19)..(19): n is a, c, g, or t
tttttttttctgttgcagnggaactttattcatccgtgcacacctgggtccctcccggcccccacctaccctggccctgcctactcagggcttccaagattgggtgtcggggtggctttgcttatcctccagatgccttcttcccaggatgtgatccgtgccctccaggatctaagggatgaggactaaaggggtctgttcctcctccaggcagctggcatggaaccgtccgtctcaacggctgcttggtggtggcggtgtggatgggtgtggctctctgtttgctggggggtattctgccaggatgtataggaagccacccagggctgccactgctgtggctgtgttgtgggaggagcagccatctggaaattgtttttctcgcctcttcactctcctcgaaaaatgctgctgatattgaatagctttagatgattcttcatcttcagcatcaggctccccgaagcatccttcctgctgtttctgccagctgagaatggcctccagccaccggagcttgtagaagtcggagaagccg

SEQ ID NO: 58744 - DNA, 482 bp, Homo Sapiens
tttgagacagggtttttccatgtttcctaaacttgtctcccactcctgagctcgagcaatctgcctgccccaacctcctaaagtgtagagctgcgtttttagtctttttttgagctgttttacaatccagtgttgaattgataagttcggattcactctgatatttgcagacttaacatcctacttcacaagatgttcatagccttgatccattacagccgctgcctcatccatctctgctcatatccttgatccaatacagcagccacctcttccatctatgctcatagcctaaactaatagaagccagagggaagaaatggaagccaacgtgagtccagaacacatgttttataagagcataagaaatttaaaaatagcaaagtataaaatgaagtttgtaatagatgtgcatggctaaaatttattcttatattaaccaatatattctataaattgggagaaaatattagacacatgaa

SEQ ID NO: 58745 - DNA, 608 bp, Homo Sapiens
  misc_feature (388)..(388): n is a, c, g, or t
  misc_feature (560)..(560): n is a, c, g, or t
  misc_feature (596)..(596): n is a, c, g, or t
tgcatttgagtgctttattatattggaattgcagtgatattaacatttgtacaaatgcacaaaatcttgtctcttcttgctagaaagagatgtaaaaatctgacctagttgaacagtcttaatgaactcattgtccattggtaacaataaatgtgttcacgatgcaacaaaaagcttaacacaaaattaaacatattaaatgctgcagcaagtatttacatgtatgtacccctttttttctccttccaataaggaaggtggttgctttacaaatagacaaacaaacacaaatgctttgctgtttacaaatacaaagaaccccaagtccagaacttaaagtgacagcacctttttgggacttcctcagttaacacttactttacacagngctaaacttttttcttttaattatatttttggacaatatttatattccaattgtcctagaacattgtatttgaactgagctatttttctgggccttttcagaggatcccaaaccctatgtcctctctagagagaacatttcaagcttatctgttctccaagacagttctcanaggcaacattcctttctctatgaggcagatgtgatntagcagaactta

SEQ ID NO: 58746 - DNA, 1375 bp, Homo Sapiens
  misc_feature (1246)..(1246): n is a, c, g, or t
  misc_feature (1256)..(1256): n is a, c, g, or t
gccgccgccacctctgagcagccggctgggagcgagagccgacagctagtctgcaagccaccgctgtcgccatggggagccgcgtctcgcgggaagacttcgagtgggtctacaccgaccagccgcacgccgaccggcgccgggagatcctggcaaagtatccagagataaagtccttgatgaaacctgatcccaatttgatatggattataattatgatggttctcacccagttgggtgcattttacatagtaaaagacttggactggaaatgggtcatatttggggcctatgcgtttggcagttgcattaaccactcaatgactctggctattcatgagattgcccacaatgctgcctttggcaactgcaaagcaatgtggaatcgctggtttggaatgtttgctaatcttcctattgggattccatattcaatttcctttaagaggtatcacatggatcatcatcggtaccttggagctgatggcgtcgatgtagatattcctaccgattttgagggctggttcttctgtaccgctttcagaaagtttatatgggttattcttcagcctctcttttatgcctttcgacctctgttcatcaaccccaaaccaattacgtatctggaagttatcaataccgtggcacaggtcacttttgacattttaatttattactttttgggaattaaatccttagtctacatgttggcagcatctttacttggcctgggtttgcacccaatttctggacattttatagctgagcattacatgttcttaaagggtcatgaaacttactcatattatgggcctctgaatttacttaccttcaatgtgggttatcataatgaacatcatgatttccccaacattcctggaaaaagtcttccactggtgaggaaaatagcagctgaatactatgacaacctccctcactacaattcctggataaaagtactgtatgattttgtgatggatgatacaataagtccctactcaagaatgaagaggcaccaaaaaggagagatggtgctggagtaaatatcattagtgccaaagggattcttctccaaaactttagatgataaaattagccgggcgtggcggcacatgcctgtaatcccagctacatgggaggctgaggtgggagaattgcttgaacccaggaggcggaggcagaggctgcagtgacccaagattgtgccactgcactccaccctgggcaacagagcaagaccccatcntcgagagatnagatgagatatatataaaaaataaaaagctatttctagtttatttcactataaagttttgctttattaaaaagctaataaacagctattaatcacaaaaaaaaaaaaaaaaaaaaaaaa

SEQ ID NO: 58747 - DNA, 515 bp, Homo Sapiens
  misc_feature (471)..(471): n is a, c, g, or t
agacaagaaattattttagtcctttagtacagtctgtttcctccttcacccccagaacaaaaatcgaacttctggttggacagcgtcagatgtcactgaggtgaccccagcctgtttgcagttccaagtcttccgtgtaggcgtcactgctactggaactttgtagatgaggagcctgtatgatgatgtcctgaacatttctatcctttcctcacacagagggaagctactgggaatatcagagacaagctattattaaacaagtgtctctagtccaagacatctcctgtggcagggaaatgagggggcaggctgtatcagtgatatttttataaactctggttttagaaaaaattcttcagatggacgcattattttaagactttaacattttccaaaaccaactgaatcttatcccctccatttatccccctccagacacttctaatcaaggtcaccatctccaacttnccccatagacaataaaaatatggctggagaattctactgtaata

SEQ ID NO: 58748 - DNA, 4113 bp, Homo Sapiens
gattattttgcttccggacctcgactggaaattttttaaaagcccttatgacaaatgagcatgttacctctccttttttctttttagcagctttcagctttaacctaatgggtctatttattttattctgcatgcttaccagtggatcgtaaaggtgggaatgctcacatgatttcttcatcttcagtccatagccgaacgtttaacactagcaatgcgttaggccctgtgtgtaagcacaagaagcccctgtcagctgcgaaggcctgcatttcggaaatccttccatccaaattcaaacccaggctctctgctcccagcgctcttttgcaggaacagaagagtatcctcttgccctcagagaaggctcaaagctgtgagaacctttgtgtttctggttctttaaatgattccaaaagaggcctccccctccaagtgggagggagcattgagaacctgctcatgcgctcccgacgggattatgacagcaagtcgagcagtaccatgagcctccaggagtacagcaccagcggcaggaggccctgtcctctctcaagaaaggctgggatgcagttcaccatgctttatcgggacatgcaccagatcaaccgatctggcctcttcctgggctccatctcctcctcctcgagtgtgcgggatcttgcctcccactttgaaaagagtagcctggcattgtccaggggtgagctgggccccagccaggagggctcggaacacatccccaagcacaccgtctcttcccgcatcaccgcttttgagcagctaattcagcggtcccgttccatgccatccctggacctgtccggaaggctgagcaagtctcccacacctgtgctgtcccggggcagcctgacctcagcccgctcggccgagtccctacttgagtcaaccaagctccatcccaaggagatggatgggatgaactccagtggggtctatgcttccccaacatgtagcaatatggcacaccatgccttgagcttcaggggccttgtgccttctgagcctctctccacctgctctgatgacgtggaccgctgttcaaatatctccactgacagcagagaaggcagtggcggcagtgttcatggagatttccccaaacatcgcctcaacaagtgcaagggcacctgcccggcctcatacacccgcttcaccaccatccggaagcatgagcagcagcagacctctagacagcctgagtggcgcctggatgccagaggggacaagagcaccctcctcaggaacatctacctaatgagcccccttcctttccggctgaaaaagcccctccaccaccaccccagacaaccttcccctggtgactcctcaggcctcctggtgggccagaagccagacctccccagtcagccccatcaggaccagcccccttctggggggaagcccgtggttcccacacgcctgtcttcccgacacaccatggccaggcttagccgcagctcagagccctctcaggagagacccacggccctggaggactacccaagggccattaataatggaaactccgtgccatactcagaccacagcctggacaggaacaacaacccacaaagtgaactggcaccatcccgtggaggtggcattttgtgtgtttgcctagtctcacctgcccgtccctccactttgcttgcattatcccgtcctcctctgtgcccttggtgctcattttctggtctgtcctttgttttctgtttgttttgcttggcaattaatcatggctcgtagtggctgcacttctttaaaaacaaagcccccatgtcatttagactaaccaccaaactgtgtttcgaaagaaaaattggccgtttagctcaactgagaaatgtgttcatttgaactcttgaaccccttgctgtttgcaccaatccccaacataccccatggtttttttgagaggcagcctctctcaatggccctatatgtgtgtgagtgtgtgccttgtccctataaggtcctgcacgcctctttgtagggacactttacaaagaaagttctctcattttgctcaccttttgccttttgagtagttttctttgcattaaactagttcacaaataaatccaaaaaatggggtggggggtggaatttttttttccttcagaattcgaccattgatcattaatcaagaatgacttcaaaattttgatatttataatagatgaaaggtgaactcttttcgcaagctggtttccagcgaaatctttgcctgttttaactctactttgttgttttaaagattcagaatcgccaagacatttcttcatttcctcctctgcttcccgtcagcctcccaaaaagatatgggattatactcctggagactgctctatccttcctagagaggatagaaaggtaattccgctgtgcctcctccgttggactgtgtgtgctctctagccttggttagtgtgagtgtgttgtgggtttgtttgtttgtttgtttgttttcttaaatcacttttgaaaaaacttgatgctttttttttttttggttaggtaataaaactatgtaacaaattctctaagacatatactaatgtttagaggtttttaaagcaattacgtattcttctgacatatagtatttgtcactgtcaccacactctgaaaaaagagaaaataggcatttccttaaaggtaggtttttgtagttctccgtagcaagtagaatagctttttgaagctctgatgacttcaggatttctgctttatatgcctaatgttacattctctgttttcatgtcttcaactaatttccagtgagctcttgtgttttaatcatgctatcttggccgtatgaaagtataacactaagaaaaaaattcatttttttcaaacgtaaccttccattctttctccctttcctctaaactaaaaccttctttcccatcttttctttcttgaaccagactaatctagacaaagatctcagcctctgccagacagagttagaggcagatttagaaaaaatggagacgcttaataaagcacccagtgcaaacgtgccacaggtatttcctagtttttctcatgccatcagttccttttcaagctgtgctttgttttcttctttgttctatggtttttgatgtagttgaggtgacggatggtgatgctggctattttaggctgcatggctttctgactactgttttagactccttcccccacacctacccagttcatttttgcttggttttcttttgagcttggcatcttccttaaaggggattcttcaaatatatgcagagaggctgctgattgaaactactctcccaccttattctcttcctctgctttccaggggcgaccttttaagttcccttcctttgcctctgtctgccttctctgaattttcagggagccatttttggcagtttccatgtcttttttgcagccctgggagataccaacctcaaagatcagtttcaaaaactcagcagcagtgctttgggtaccctttctgtgcatggtgctctcagagtagtagtgtttgtcattttaaagttcagaaagttctcaatgaaaaatgcactcagaggtcagatggcctggacacacaaaaaaagtgtttgaaactgagtctgccatgatattttaaagggagctatgtcaaaatgtggtttattaaagggtatacgagagagagtaagagagagagagaaagacatcatggtaagtaggtttccaaggaggaaaaaaccaaatgttcatagaactgcctggagggctccctgacaaaacaaaagagactcttaaaaggaaaaggtatctttagagaaggtacaaaaggaggccgggcgcggtggctcacgcctgtaatcccagcaatttgggaggccgaggcaagtggatcacttgaggtcaggagttcaagaccagcgtggccaacatgatgaaacccagtctctactaaaaatacaaaaattagccaggcatggtggcaggcctctgtattcccagctatttgggaggctgaggcaggagaatcgcttgaattcgggaggcagagctgagatcacacctctgcactccagcctgggtgacagagcgagactccgtctcagg

SEQ ID NO: 58749 - DNA, 548 bp, Homo Sapiens
  misc_feature (489)..(489): n is a, c, g, or t
  misc_feature (508)..(508): n is a, c, g, or t
  misc_feature (535)..(535): n is a, c, g, or t
gtcccactggttttatggtttattcaatattatattatcattgctacaagaaagaatcaaagaagcatattacataaaatatatggataagctaaaaagtaaatagagcagtagtcctaggcatttccatatatcttttattcaacccattttcatattgacactccaacattaataaaccatttaaccatcaaacatgattgcaaattaatattcttaattattgcacattggttctgcctatatgcctatatgcaatccacttgtacagtgttagttcagtactagagaagttctgcctatatgcctatatgcaatccacttgtacagtgctagttcagtactagagaaaaaattatcttcatttaggtctctacttaaagtacatctcattaatgggatcttccatgaccattctatcaaacctcagctcctcccaccccttttccctattttttttaccattcatactactaattggaaagttgnaatacataccttaatatcnggtctcaccatgagagcagggcttttnccggtaaaccatc

SEQ ID NO: 58750 - DNA, 679 bp, Homo Sapiens
tttttttttttttttttgcaaataggcaatccctcacataatttggaatattaagtttattcaagcatatttggtcagaaggagggtgatctcacattccagatttctaggcagccctaatttcaaataatctgtcccattatctgatttccgtatgtactgatatttatttggaacctatgattcctaagtgtagcaatccagctaattctaatattacctttcagaagattaaaattcatttttctactctgaaattacatgaagctgttgctctgccgatgattttcttccctattagccacctataattgaagattgcctggttgtaaaagggagccagagatctgacgtaatagagattaaaggagtatctagctctagcgtttaccctacttatatatgtcccacttttcctggaaaagaaataaacatatctcctggagatatgcctcaagaacatgatagtacacttaatacaatacaggaataggagtaaaatcaaaacacaagctcatgactgttacaactatagtctttaattgtacatatgcatgcacacttgtgtacacagatgtaaacttggctttgagtatatttatatatagcacaggcttagactcatgcatttggtaaatttggggcactagttgtcttattgcctggaaaatactataga

SEQ ID NO: 58751 - DNA, 483 bp, Homo Sapiens
tgatttgccaatgcataacagggtttcaagtttcattaatgaagggactcaatcgcctagaacactaatttcccttccaaagaagagaacaacgaagtttgtgaaaggtgactcttcccctcttggaccgtggaattcacatttcatattcttgatatcaaacacagtgaaagctaaagagagggagaggatctgggagctgaaaaataaaagagcaaagatttcaaataacgaaaaaaaaatcaagaaaagccaaatatataaagaaatgttttcatctgacctgctggcagaggatagtaatcttgttcttcattcacatcttcagccacgaagttttccttaacttcaccgaggttaatcaggagtagttgcttccagaggtcctgtaaagcgcacagagctctcgcatgcgcttaacccccaagcccgccctactccgtgcaacactctggagagtaaaaaccagctttgtccatatct

SEQ ID NO: 58752 - DNA, 1904 bp, Homo Sapiens
attgaaaatgaattttttgtattcaccagatattcttatatgagaagatctattttaaacagtctaaatattttttcttctgttggaccagcatggcaggatttaagcgagggtatgatggaaagattgctggattatatgatctggataaaaccttgggtcgaggccattttgccgtggttaaacttgccaggcatgtctttacgggtgaaaaggtggcagtaaaagttattgacaagacaaaactggacactctagctactggtcatcttttccaggaagtgagatgcatgaaactagtgcagcatcctaacatcgtccgcctttatgaagttattgacacccagaccaaactatatcttattctagaacttggggatggaggagatatgtttgattatataatgaaacatgaggagggtcttaatgaagacttggccaagaagtattttgctcagatagttcatgctatatcttattgccataaactccatgtggttcacagagacttaaaaccagagaatgtagtcttctttgaaaaacaaggtcttgtaaagttgacagactttgggttcagcaacaaatttcaaccagggaagaagctcactacaagctgtggatctcttgcatattccgctccagaaattctgcttggtgatgagtatgatgcacctgcagtagatatttggagtctgggagtgatccttttcatgttggtgtgtgagcagccgccctttcaagaagccaatgacagtgaaacactgacaatgatcatggattgcaaatatacagtaccatcccatgtgtctaaagagtgtaaagagtaagtaaaacaaagtatgtggaaaccttaaggactcagattaaaaccagaagttttaattccattaatatgtcaagaaaatttgagaggacttcaaacatccaagcatctgggttgattttaatttttgaatttaatatttctgctgttgtttcagagtgttcggtcggcgggggtgggggtggttagcccctgaatatgatctgaaatttaatattagagtacaaaatgtattcatctatttcttattcaagaaatctattacatgcctcttcaaccttcaggagtggtggttatttcacttgaactgaagaaataccatgggaactacctttctctgcatgagcaaaaagcaagatcacctggaattgttttaagttccagagaagagttagggcattttctttcctgaatagaccatcaacacactattttagggtttacatagtatgtctcataattttcttcacacaccttctgctaattgactaaagagctgtttaggtttatgtgactatgggaagccagcataaaaagtatactcaattatttggaatttaaagtagtacatagtactatgatatgtgtagtgagaaatacagtaatggaatagaactgttggaagttcagtattgacattttaagtgacattttttaatgagctcagctgagattatagccactacttacaggactttgctgtagaaacagagttttgagtttctcctatcagctggtaagaaggaaatctgattgcccaaggactttttttctctaaatgaagccccatctcaggtggatgtttaagaacttaggtattcaaggccgaggcaggcagatcacaaggtcaggagatcgagaccatcctgacttacatggtgaaaccccgtctctactaaaaatacagaaaattacctgggcgcctgtagttccagctactcaggaggctgaggcgggagaatggcgtgaaccctggaggtggagcttgcagtgagccgagatcgcgccactgcattccagcctgggcgacagagcgagactctgtctcaaaaaaaaaaaaaaaaaaaaaaaaaaaaaaaaa

SEQ ID NO: 58753 - DNA, 590 bp, Homo Sapiens
ttttttttttttttacattgtctaatagacttgtttattattttaagctggtaaaaagagacttatgattcatgttgaaaaaagagttatttgtgcttgatacattgaagacactgttcaaaagcagtttgtccttataaaaggatgacccctgtagtatttcttaggcaaggagggacaaattcaaccaacgaaaagcacatctcgccccgagttccccatgatttcttcacattttggcaaaaaaatacacatcagtaatttatttgaacatgcacatcagtgagtagcatagttctaggctactcaagaaacaaaagggagaatatcagcattacctaaataaaaaagagaggtgaatcacaccattttaattgtcttaaaaacacggataagaagagcaattaaaatatagtcctaaacagtactagctaatgtagattacataagtatacaatatgattcaactaatagtgctctgacaagcataaaccaccagttctagtaaacaaggaccagatcaattgctgagaaaatgttagattcaaatgtagaacaagttacttttatttcagtactgaatgcaaaac

SEQ ID NO: 58754 - DNA, 631 bp, Homo Sapiens
tttttttttttggcttcagaattttattttaaaggttatacaggatcagattatgagactgttgcaaacctgggtaatctgtcaggtgtatgagatgaaagagaaaagccagtcaaatgaaaagacaaagtaaatatgtttttcattttatagaaccattcagtagtaatgtaaccattcagttaaccactggttaactgttatgataactgaatgttaatcagttaaccattcaaaactaaacattcagatttctctatacatgagccacattattaatgtgatctctaaatcttttggtaagttaaaatattcgtgtttattaaaaagtaaaagtgtttgtaattaaaaattatattaattaaaatcttaggcacttaaattaaggtatgtgtcactttagacatattaaaatagtgtataagaacaagtttttaataaatatctcaaaaggctgatatattatgcctagacatgcttccactgtgtttttagtgtgtctgattcttttaacctcgatctctttggatggcatgtggtgggggaataatgggcaccttgttcacaaacacaaaccttctcctgagatacagtctggtgatgtgtgaacatactaaggtctgaaaactct

SEQ ID NO: 58755 - DNA, 530 bp, Homo Sapiens
gtttggttttattttaacatgaagggtagtattaagtctaagcaagaacactgggcctgcaccaaaataaacaaacacacagtgatttttttttttttttttcttagcacagaggcagccagtattacacagcccctctctgtgttgtgaccctagcttgctgcttctggctgtgccaaatgctaagcaggggtttcactcagggcagcccgggaggcaaggtctgagagtggaagctcctgggagcctgagctctctctgcctctcgttagctgtggctttggccatcaactggaactatgtcattatttataaaacaggagcaatcacagggctgtggtgagaatcacatgaggtgacacatgtgaaatggtcctttcccctaagacatatataattgtgacaaggaacaaaatttacatagaaaataattacagaacaacgtaggaccatgtcttcatttctccctggagcggatgtaaaataaggtgattgatttgagcaagcatgttatgaatatttagaaatgt

SEQ ID NO: 58756 - DNA, 486 bp, Homo Sapiens
tttttttttttttttttttttttttcattgcatcgggtttttaataacagagctttggaaatgccttaaacacccatccgggggactgatgatgaacacaaaaagggcacagggcaagagttttcggttggtaaaaatacctgcctgaggccgggtgcaggggctcacacctgtaatccctgcattttgggaggccgaggcaggcggatcacccgaggtcaggagttcaaaaccagcctggccaacatggcaaaatccggtttttttggaaaggaaacctagggctctgcattcgtccccaggctaaccacccagcgcattttttgggctaagggtctttgggtaggggctggctttacaggatgctccaaagggcctcgtggggagggtgtattcaaagaggggtagtgcacgcgtccactccaaatggtcctcagggaaagaactttctccacacggtcatgtgagcaggctcctggcagcagt

SEQ ID NO: 58757 - DNA, 2406 bp, Homo Sapiens
gctcaagcatggcggcggcggcattgggcagctcctcaggctcggcgtccccggccgtggctgagctctgccagaacaccccggagacctttttggaggcctccaagctgctgctcacctatgctgacaacatcctcaggtgcagggcaacggggtcggacggcgggtaccggggtgggtgggccgcggcaccttgttcggccagggactggggcgtccggcctgagcttcagagggcagcgacgcccggacagaccgggacctggagctggttctgctcctaacgtccgagcccgccggccaggggcctcgggacccggccaagtcccacccccgctcgagaaaaggaagtttctttgcagttgtgacttggcacctgcagtcagggtgctgcgggtgaactggagtcccggaagcggggccgggcggaggagaggtaggaaggcgtgcttcagacactgccgctcttctcgtcgtttaacggcctcagatatcgggacacaacggtaaccgcaccgcgcgtgtcattccccctgcgtgcatttttcgagcggagtggcttacatttccacatacttatcagaagttactcactgacaaagtgatgttttcttcccatgttgagactatccgagtactaaagcataatgcttctgaagtggtgggttttaaaatttttaattttttttctgcccacttttgttgattgaaacattatagtattttgaagttacagtttttatattaatacctggattctactatgtaacataaccctttaagaattcgtggaggtaatcgccttggatgagagtaatttccttcattctcctgtcagcaaaattgcacttctagaggtctaagggaccttgtagattttgggaattgggaggcaagtttgattattcattttgaataagtacccacctcaactcttcagatcaaatgatctgaagggacatggtgtgggggggtagggaaatggaactgaggttaaaggagagccacttgctttaggggtgttacctcatttatcaggtcaccgtgattaattaggttctctgttcccctcagcccctggtgcattaagtgtttggtatattgtcatgaagtctaaaaggaaattctcagtttcaaggttataggtttcacgtgacccaattttagacattagttacatgtgcagtttttaaaatccatgtcagtaatatttcatttaggcaatggtaatgatttttaaagtaaattgaagggaaaatatattgagcccttattttgtggcagatgctatgaaagatgcaacatgtggcctgttcacagctacataattgtgacctgtgtggggaccaacttcgtgctctgtgacaccttctcaactcaccttttttactctttgaggccttacagctcttcacagtacaaggatgccaagggactccataaatgaactgataggctgggttctccagagcccattagctgagacttaccacctggaaagccaccaggctatttaaaaccccactagtcagaaaagagaggtggccttgtaatgaagcctcacttctgctttaaatctagtgaaacccaaaatgctgaggtttagtatgaggggggaacctttgcatgcaaataatgacatttagcatcataatcttcattatgaatgtttactaatggctcgttgctgattttcgtttttgagacggagtttgctcttgttgatgaggctggagtgcagtggcgcgatcttgactcactgcaacctccgcctcacagcttcaagattctgaaagatgaggggtgtgacaatgagcgcaaaggatagtggacacactggaataatgctgagaaattaagagtttaagaaagtctttgtgcgttgcttttccaaggataggaaagaggatatgatgggtttgaagtctaatgtccctacagccctctaagtctttgagggctttagggtcaggcctttggtatcagtctatacacaaaaccacggtcagtttactcaacatacttaataagaaaaagaatttgaggaactggatgtgactgtcattgctggagcctgtttgcagtatacttttactgagaaaaatagattaatgtgaggtccagagatgatataaaaataaaattgctcactgggcacggtggctcacacctgtaaccccagcactgtgggaggccaaggtgggcggattgcttgagcttaggagtttgagaccagcctgggcaacatggctaaaccccgtctctacaaaaaaattaaaaaattagccaagcatggtggcagacacctgtagtcccagctacttggagggcagaggtgggaggatggcttgagcccataatcatgccactgcattctagctttgatggcgaagtgagacctttctc

SEQ ID NO: 58758 - DNA, 574 bp, Homo Sapiens
atctaaatgcaattttaaaatattttattatttttaatatagtgttgtaacatttcataatattgcatactactcaaaagttggtttatttagtagggtaagaatatcttctcttcttactccccagtcagaatttaaagatatactatccttttagagctctattatattggctcctaaaatgtcacatttcataaaacagtaatgctataaactaaactgaataaaggttaagaacaatttgatttcacagtttcgcaagcagccagtagattgctgaattgagaaccataacaaaaattcactaagactttatatttatttttccataatgctccttcttaaaagaagaaaaaatataaaggcaaaggtaatatatgcttcttttagtcccttatccaataaatcaacctttaactgcaaataggttttacagttaccaaatgatatgttagttctgtgccagcagaatttattacttttttgctttcttgttctggtgttaccagtaagttgaccaaatgacactaaaatttaaggacactatcacttaaaacaacgttttgaaataaaa

SEQ ID NO: 58759 - DNA, 500 bp, Homo Sapiens
gattttttttttttaattttacttttagagcttgctgtgttgcccaccttttttccaacctccaccctcactccttctcaacccatctcttccgagatgaaagaaaaaaaaaagcaaagtttttttttcttctcctgagttcttcatgtgagattgagcttgcaaaggaaaaaaaaatgtgaaatgttatagacttgcagcgtgccgagttccatcgggttttttttttagcattgttatgctaaaatagagaaaaaaaatcctcatgaaccttccacaatcaagcctgcatcaaccttctgggtgtgacttgtgagttttggccttgtgatgccaaatctgagagtttagtctgccattaaaaaaactcattctcatctcatgcattattatgcttgctactttgtcttagcaacaatgaactataactgtttcaaagactttatggaaaagagacattatattaataaaaaaaaaaagcccctcgtgccgaattcttg

SEQ ID NO: 58760 - DNA, 569 bp, Homo Sapiens
cacatttagcaaagctattttatggcaacattgttacaacacaaaatagacattgcagtttacaattaacaattacacagtgatttcataacaatactacttactccaattaacaaaatatttctttataaaaaatatgttcaaaaggaggtttacattcacttcttcgtttaatatcaaggttgttaacaatggtcttaggagatgcaaagacgaaaaactacttaccttaaaaatctgtattcttgaagatatatactccacttgaataagatactgctcaaggtttaggcttcctggagaactcagaggattttgtagttgtacttaatatactcaatagccaaatttcctaaactttcataattttgctaaccaagggcccttaacaaagttaaaagacaccacagggttcaaaagtgaacaaatatgttgtttttgttttaagacggagtctcattcttgtcacctaggctggagtgagactccatgacaaaaacaagacaaaaagaatctccttaaagcataaatctcataggacctataaaacaataacacaatgaagaaaa

SEQ ID NO: 58761 - DNA, 520 bp, Homo Sapiens
tgttaagcatatttgtatattttttactagttatttcatacttgccctgaaagaatacacattcaaaaagcttgaaattaggcaatgtcagtctcatcaaacaaaaccagcattggaagcgaatattaacaaatatcagaatgaaattacaaaatatacatctccagcctcataaaacatgaattttataagcactttcataaacataagaaaaatagctttgacaataactatttgaaaacattattattaaataatcttgtatactgaacatgtgcacttaaatgtaatagcaccaacattcattatattatgaaggggatactttataagaattataaattatttttacatgattaaataattttggcagagtaagtccgcaggacttaaataaccagtcagccttagtatctacatctggaccaggaagcctttgtgttacagacacagattccctgtgaagttctccagggtgtaaagaaggccccagggaggtgccgacgggatgtgagggctg

SEQ ID NO: 58762 - DNA, 338 bp, Homo Sapiens
gtcattttattcttttaataagaaacttttgcttacaaaaacaaggtgtaaaaagatttacaaaaatcataaaaacatgatttatatttcacacttgagagacaaaaacaagccccaaaacatggattttaatggaggtggtttgcttcattttaaaagggaaaaaaaaaaaaggaagctgtaaccatacattgatgttaacctagcatgaagtttattcttgaagaatttacattgttgagcaatattaggggaagaagccatttggtgttgcatagcattttagtgcaccagatgggttttccagacaccagggaggcatcattgctggaatagtg

SEQ ID NO: 58763 - DNA, 753 bp, Homo Sapiens
tttttttacaacttaaataatttatattacaaaaggaagaaaagaccaaaacatccccaaaattctcccatgggcttccccctccactccaataaataaggtatgggagactgaccggcggagggggtggggatcatggttcagcagaagggggagcttagccgggggggtggcaagcacatccaacccacctcccccagtccccggcactacggtcacattggccagaacacagaactctgcccacagacagcaacagtctctggatgtgtcttgaggagtgtggccggggaggaatgtcatacctcagaatggccgggatggctgccccacccctgtggccttcccagttctggaaagcatcgggtccagccagatccatgctggctcccagggaatttagcagcatcaactgaggcgcaacgcacccaaaggggcctaagatggatggaatgggccctccccaatggggaggcacgagtatgaaaactcgtagtgagagcaggctgagttgggagtcgccgtgccagcctcaaggtctctaggagagaggggtcaacaaccatcccctcgccagctcagcttgcagctctatgactacaccacgacgggggtgggggacgctggtgttggccagtcaagtctcaatggtgtatcttcatggcaaaggttcagtgtaggtgacaaggtgctgacaaacttgagggaagggtgaggcccagtgctgccaattcctgaactcgtgccgaatcc

SEQ ID NO: 58764 - DNA, 505 bp, Homo Sapiens
tttaaaactgtatgcctttattcaacatagaatgagtcagtaaaatatggtttgtctatgtgcagaaacatacattcaacttcgaagaaggttgtttttatacgaccaatgaaacagcctaaaagtgacaggaaagaagacaatagtgaggagctaaaaggcagagtttatttgtcaaagtgctaaggcctatgcgcacaaagattttaagtgaataagaattacatacggtaatttcttccattccgacttctcttagtgctggtgaagggtgcaatgcagtcacagaattaagacaggttttttttttttaaaaaaaataggtcaaagcacttacagctaagtgtttttttttctttcaaatttctagagtttcatttgttatgttctctagatctttcatggattctagaaattttgtgaattctctgagaacttgctctttaatcagtactttattattagagaataaattaagatgtttgtcccaacctagaatctgtct

SEQ ID NO: 58765 - DNA, 479 bp, Homo Sapiens
tttttttttttaattttaaaatgcttttatgtaggcaaaagggaaactatagtactctcactacttaatatttccagttctgcctaaaacaaagacatacattaatttttaacaatctttgtctcaaaattctaggaacatttggaagaagtatttaaagctaatgcttactctttgcgtgaaattttatataatctcaggaatagaaatttaagaaatagaagtcttctcatttcagtttgctaagcacattcttcattcttacatattacaggtccactagattcaaaggtaagccaaaaatacatgcaaaagactgcctcctaaattatttaaatctcttttgtagcaaaattttcccagaaactgaggaacatccacacagaaattcttacctttttatcaaaagtttgttatccttttctcattttctgggcctttcaatgcattggcattgacaatagtgaaaaaattatttg

SEQ ID NO: 58766 - DNA, 549 bp, Homo Sapiens
tttttttttttttttttaggtaagaattctttattacgtttaaaacattacaaccaaattcaatttgtatgtctgacacagaaaaaaaaagtcatggacaacagtaatacaaacatttcagttttgatgtcacaaggcacaaagacaactgacaggtggccctcacgaagccaacttctcacccttctctgtcccaccctcctactcccttgttctttattctcacacagcaaatttcttatgcagtcgtgtctaatacttttgttaataaaatggcttttccttaaagccaaggtaaaagagaagctatttgtgtctcttttagccttcccagaagaaatgagtcagactaggtacttcatggccagccccaccaagaaactctaagaaaaatttagctaaactactatatctttttccttctcacattccttattcctctatatctgatccctcttagttctacctaaaatcttaaaatgtagtgaagatggcagatttttgctgttaagcagcttctgcctggagttctgaatccagatgaatctg

SEQ ID NO: 58767 - DNA, 519 bp, Homo Sapiens
tttttttttttttttaaatcttaccaggtgcttttaatgtagaatcaaggctgagaaccactgatttgaagaaaattatgggatgtcttactttaggtaacagatttttaggttgggctcttttaagtgttttctatgtatctccttttgagaaaatgcatataaccaagccattctttattacatgttatttctgactcatgttagggttagtgaacaatgtacactaggtagaaaatgtaaatttcataaagcagggactcatctgtttaatcaccagtttaaccattgtgctgagaccaattcttgaaaaaaggcagttgctcacaatttgttgagaaaaaaaaaaaagaatgaacctatttaacaagcctttacttccgggcccaattccttctctctcttgtctttctaccatccttggactatggattcaaggtacctaagattatacaaagcagctcagcccaccacctgttttattaaataaagtttattgaaacacagcaggcctatttg

SEQ ID NO: 58768 - DNA, 579 bp, Homo Sapiens
  misc_feature (335)..(335): n is a, c, g, or t
  misc_feature (502)..(502): n is a, c, g, or t
  misc_feature (514)..(514): n is a, c, g, or t
  misc_feature (554)..(554): n is a, c, g, or t
aaatatttaaattttattcttaaatactatttattaatacagagaaatactcctgctataattttaagtgacacaatagtacaacaattgttaagaacaatccacctgtgtcaaagagacacatacacaaacacacatccatatacacatacaagcttcggagaaaattctgaaaggatctcattgtcctagatggtggcattatgggcaattattttgcaaatgtcacccagtgaagaagcaatggtgcctttggaaagtatgtagctcttagttaagcttttatctggaaggtgctggagaaggtctgggcacagagctggttcggctccatnggttttgtgacctgtgccatcacataggaccccatgttcagaaggaccccactcttgggtttaatgctctgctgccgtgtcttgaaattcttaataatttttttgaacaaggggatgctgcattttcactgtgttctggggcctaatgattatgtagtcaatcttgnctggcagctctnctctggcccatcactggtagatgattgtgggggtggttantcctttaaaatttccatttaaaaaa

SEQ ID NO: 58769 - DNA, 544 bp, Homo Sapiens
actcagctgtttaatcagaatgcctccaaatttacaaagcaaatgttttaatgtccaaggctaatacaccactgcaagggaagaacaggtaggaaaggaaaggggcactaagagaggaacacaccgtaagagggcttggctactgcatagcacatcctcaagactatctcagtgaccacttttaaacatcattaaaacctgttttggaaaggtacacaatttgatctatccccacagacaaccagtcccctaagcctagggtgtcaacaagaaaattctatataaatgacttctagccttcagctaatttacaagctagggcacccaaacatattaatgaagctgattttcatgtcagatggtttccagagaattaacacagttctctcagcatgtaagagggcagcaaaaccatgaaaccaatacagcacttaattttctgcttattaatgcaaacacatgaaacaaatacctaatttcagttcaaactcatttcccttttattaaagtccaagttaccattacatggcttggtactcaataa

SEQ ID NO: 58770 - DNA, 563 bp, Homo Sapiens
  misc_feature (543)..(543): n is a, c, g, or t
catgaatcatgtttggttcctgtgaaagtccctggtccagggatcctcctcctttctcttttacttctgaattctgaaattcagttagttacttttgcctttcgctcttctatcacagccaccttgaccttgggtaaaacccaaggtctttccttctggctaccttcctgcaggtccaccctgtctgccattggtctcctctgcctctgactacatctgccaccaacaaccctcccctcacccctgccaggggcagacaggcttctcagcagaactgtgactgaaatcagagctgctgtctggggcagtgttaactacacagaggcacatcctgacagggtttgccccagagatctaaattccagaaggagggcaccacacctaggaaggtaaatccagtatcagaaggttgctaaaagattaaagatcaagaagcttggaaacatcccatgggtacaatgtcttagaaagtctttaagtcacataccatgaatttttgcttcattactgaccatatatgaccttggaggaactctttttttnttttccttctactcatttct

SEQ ID NO: 58771 - DNA, 567 bp, Homo Sapiens
  misc_feature (481)..(481): n is a, c, g, or t
  misc_feature (491)..(491): n is a, c, g, or t
  misc_feature (496)..(496): n is a, c, g, or t
  misc_feature (538)..(538): n is a, c, g, or t
  misc_feature (549)..(549): n is a, c, g, or t
tcaaattcataggatgtctttttattatgctaataatttaatcacattccatggggtccacaataaactctttatattgaattccattccataataaaaaaaaaaagaacaaaaaaacaaaaacaaagcaaggagctctatttttgggaaaacaatgggtgctcactgcttaactggattgtattttatttggcttttcaacacggcaatacaaacatattatgaaatgagtgaaaagggcataataattttattctaggtttctactaccttcatgattaagacttaactagctactgctgcttggccataatccactacagtccctaaacaaaaaaactatgaacaaagacaaaaataatctgtaatttctcctacaaaggttaacccaaattaacttacagcagaggtgaacaaactactgcctgtgtgccaacataacccagcttggtttttattagtaagggtttacatattatcnatggattggntttcncactacattgggcaaagctggaataactggccacaggaatcncacagcctgcnaagccctaaataattact

SEQ ID NO: 58772 - DNA, 560 bp, Homo Sapiens
tttttttttgtcagccaatggtgatgctgggaaaaggtcatcagggaaactatctctacactgagttctctaatgccctgggaagagcattacactttcagcactgtggcaacgtgtactctcgttgaatggaaggctatcagaggccttataccaccatactaagaacatttctactgttttatgagaggcctgtgcccatcttagtataagaaaatgaacaagatttcagggaggttagtacgattgagtaaaagtaaagcttaagttgttagtcctggctagtcactcataacctatgaatttaaattatcttagggcctctattttttaatctgtaaaatgaggggatcaatgtgttacagattagttgatccttaaggttccttccaaatctaagcatgtcacttcctactcctgatagtgctggtggggagcagaaaggatacggccaggaatagaaaaaagggtaaagaaacttggttgacagagttggtttaggactagtggatggcatcatgtcaagttgtggataatgtcacgggttggctgagatatac

SEQ ID NO: 58773 - DNA, 497 bp, Homo Sapiens
tttatgggaagatatagaaatgcatttattctggtaaagaacagctaacactttcatagtgctcacaagggacaggcactctcatgatccctgcctttataaaggagaaactgaggcacagtatttcaattgaagcacagagctacaaagagggagtcaggattcgaacctagcaaactggcaccaaagtctgtgctcacaacccctacattacactgaggggccctaggccacacccagaaagtcggcatcagggatgctggcaggcctgggatggagggaagtttactttttactgtacaccttgtatatatactatttgaatcttttacatgtgcacattactatttttttaaataatgtttttaaagttgggcaagtcccagttaccaagaagtaacagaatcctgacaggtgtggagcttagggaggcagaggaactgctctaaaaccagtagtctcaactcggggctggcctccagggttgcagcaattcg

SEQ ID NO: 58774 - DNA, 467 bp, Homo Sapiens
tttttttttttggcggggcaggggttggcgggggcagtcctttgaactaagattctctcaggaaccactgcaggaaatgaagtgattcagaactcaccaattatgaactaaccttcaatgccagaggctttaacagtttctaataaaaattcagttcagatctcaagttcagataagtctgaaaaaacacttcaaggtcatctgaacgaacatattctaccagtactttatataattgtatttacctgttcctaaaactttccgtgaaagaaatgttgaattttcttcagaaatagttttgagcaaaatgtcaaaacaattctcccatgctcagtgtacttttgactatactctgaaaatatttcttcttgttttcctgcacttacctgttagtgtgctcacactcctgtattatggaacatgttcagtaactcatacacatgtaacacagaagtctgttttcagtt

SEQ ID NO: 58775 - DNA, 556 bp, Homo Sapiens
tttttttttttttttttggatataatctttttattttgttgataaaaaccagtatggaggaaaaacttctggttaaatcttgtaactttcaataaatgcagcataggttaagggagaagcggaggcctatcctacagtaatacttactccattggagatggggcagagagcacagcagggagggagtagcactgtctaacatcaaaaagggaaaaacaagaaccctgaaaatctcccctctccattaaaaacttcagtaggtaccccagttgccctggattaaaggaactaagtgcacttaaatttaagcctgagagatgatatcatccctcacttggggttaaagggtctaccttcccccttcactcacacacccctccttaactaaggaatttttctgcccatttcgagtgcaggccatatgccccttctttccttctccccaacccagtaacgacatgggcttgcctcttctattccctcatcttcccaaaataccacaaaccaagctgaatctatattaatttcccaggcattattccttcacctcccccca

SEQ ID NO: 58776 - DNA, 403 bp, Homo Sapiens
ttttttttttttttgctgctaaatattgtctttctttattcacagatgatagtcaatgggcacaacatataagtagttacaatgaaatgagaagcaatatagcagtcaggctatatgcatgatttaacaacaaaattatcacttccttttaatttagaataagggacaatttaaaaagcatctcttggccctatcatttctgttccagtagttagtgttcatatgtgaatactaagtttgacattcctttctcccatagaaccattttggtgatttggatgggggccactacactgctttctgcaagaattcagtcacccaggcctgatatagctttgataacacacgagtcagtgagattccagatacttctgttcaaaatgctatggatctcctgttctat

SEQ ID NO: 58777 - DNA, 525 bp, Homo Sapiens
tattatttcacaattttttttactaaaagaatagatttttattaagcgttgtaagtttctttccatcagcattaacagaacaacagaccaatttccatcacagaacaactcctgaggcattctcattcctttctgaaactcttccattaactcctgaagtttccccaaagaagcatccattcaaacttacattaataaactatggagcttttgtggtgaggtgggccaaaaaggcagggaatttggaatctgggagtgggaaagagaaatacatattatccatccactaaacacactgtcaaaagcacaggagaggagatagtaatacaggaaaaaaacaatgaaataattttttacttttgtcaataacatcatttatcagggagcactaaaagtcactgactccttgcagttaaagtttctttacctagtgtgttattctaaaaacagaatagaacagaatagaacagaacagaatagaacagaatagaatagaatagaatagaatagaatagaaggtacgag

SEQ ID NO: 58778 - DNA, 4935 bp, Homo Sapiens
tccaaacccggcaatgttggtggctcttgcattcctctggatgagcgaatctagttggggggttcccgaaggggaaggcgcctgggctttcaatacatcctcctgaatcatactgcgtttcaggttccttagaaaaatttggatgtgtaaaaagaactcttaacggcgatgcaggtcttccacagctaaggaaccaacataaagagaaatgcagacgatataaccagtaatgaccatggtgaagataaagatattcatgaacagaacagtaagaagcctgttatggtctatatccatgggggatcttacatggagggaaccggtaacatgattgatggcagcattttggccagctatgggaacgtcatcgttatcaccattaactaccgtctgggaatactagggtttttaagtaccggtgaccaggcagcaaaaggcaactatgggctcctggatcagattcaagcactgaggtggattgaggagaatgtcggagcctttggcggggaccccaagagagtgactatctttggctcgggggctggggcctcctgtgtcagcctgttgaccctgtcccactactcagaaggtctcttccagaaggccatcattcagagcggcactgccctgtccagctgggcagtgaactaccagccggccaagtacactcggatattggcagacaaggtcggctgcaacatgctggacaccacggacatggtagaatgtctgaagaacaagaactacaaggagctcatccagcagaccatcaccccggccacctaccacatagcctttgggccggtgatcgacggcgacgtcatcccagacgacccccagatcctgatggagcaaggcgagttcctcaactacgacatcatgctgggcgtcaaccaaggggaaggcctgaagttcgtggacggcatcgtggataacgaggacggtgtgacgcccaacgactttgacttctccgtgtccaacttcgtggacaacctttacggctaccctgaagggaaagacactttgcgggagactatcaagttcatgtacacagactgggccgataaggaaaacccggagacgcggcggaaaaccctggtggctctctttactgaccatcagtgggtggcccccgccgtggccaccgccgacctgcacgcgcagtacggctcccccacctacttctatgccttctatcatcactgccaaagcgaaatgaagcccagctgggcagattcggcccatggcgatgaagtcccctatgtcttcggcatccccatgatcggtcccacagagctcttcagttgtaatttctccaagaacgacgtcatgctcagtgccgtggtgatgacctactggacgaacttcgccaaaactggtgatccaaaccaaccagttcctcaggataccaagttcattcatacaaaacccaatcgctttgaagaagtggcctggtccaagtataatcccaaagaccagctctatctgcatattggcttgaaacccagagtgagagatcactaccgggcaacgaaagtggctttctggttggaattggttcctcatttgcacaacttgaacgagatattccagtatgtttcaacaaccacaaaggttcctccaccagacatgacatcatttccctatggcacccggcgatctcccgccaagatatggccaaccaccaaacgcccagcaatcactcctgccaacaatcccaaacactctaaggaccctcacaaaacagggcccgaggacacaactgtcctcattgaaaccaaacgagattattccaccgaattaagtgtcaccattgccgtcggggcgtcgctcctcttcctcaacatcttagcctttgcggcgctgtactacaaaaaggacaagaggcgccatgagactcacaggcaccccagtccccagagaaacaccacaaatgatatcactcacatccagaacgaagagatcatgtctctgcagatgaagcagctggaacacgatcacgagtgtgagtcgctgcaggcacacgacacgctgaggctcacctgccctccagactacaccctcacgctgcgccggtcgccggatgacatcccatttatgacgccaaacaccatcaccatgattccaaacacattgatggggatgcagcctttacacacttttaaaaccttcagtggaggacaaaacagtacaaatttaccccacggacattccaccactagagtatagcttttccctatttcccctcctatccctctgcccctactgctcagcaatgtaaaagagacaaataaggagaaagaaaatctccaaaccaggaatgtttttgtgccactgactttagataaaaatgcaaaagggcagtcatcctgtcccagcagacccttctcattggcattttccagtattgtgagatcaatttctgaccatatgaaatgtgaaaagtatatgtttctgttacaatactgctttaagatttaaaccatgccaacagatgtttcgtgtgactaggacatcaccatttcaaggaactgtgtgtttccaacatcatggtagcagcacacacttccaaagctcagccagggacacttaatattttttaattacaatggaaatttaaacatttttatgtgggctacacaatggatggctcttcttaagtgaagaaagactctataggcttttacacagcacatgaagcagtaatccagaaagaaggaaatgcagaattttattatcaaagtaagcgaattgactgtgcagaaaaattgtagggttctgtggaaggaggtattctgccagcctgaactatatttaagaaactttgtaaaaaataaaaatgtatatagctgtgagctcaaacaaaaactgcagacaaacaaaaaagagaaaagcttttatttgtgttttcagtttgaaagaacttttagcaaggttgtgctttcaaacacatattagtcctaccaccttagttcctctacagcaaaagaggcttttcttcttaattacatgtaaacaaagacatgggattttctgacgtaagattttcatttgtaggaatatgtgatgtcaaatggaagactcagaagttttgtgtggcctatttctccctgtcaggttgcacagatgcatgtagagcattcttaggagaccattgttttagaaaactttgatttgtacatgttagttttcatgaaattgcaacacagagataggtcctaaaagtggaatgtatttaaaacttgttgaattagacacacacacacagacacacacaaagaatcagcagagaaaacaaaatacaagtcctgttctgtagttcttgccctttgaatatatttgggaagagttgcttcctatttcaggaccctgccaaaaaagaagaaagcttgcctttggtggggctatgccccttggagtaaatacagctctgtgttccctagcagctgccggaggatttggctgatgaagtacctgctcagcttagctaatcagattaaaggaagacatgtatgtcttttgtttaagcacctagtcccttatgtatcagtaaacaggtttttaaaaatcttttatgtcatttataggataaaacatatgcttgtctgaaaatatcaccttttgtggatttatctgatcaccaaataataaatattaagaagaatgggggaaaaaggatagaatattaaaactgctttgcataggtttttggggaaattaggatatcttcactgacaagacactgaatggaatttattcacccattttaaattggttacttggggatcagagatttgtctctccaacagcttgtggttttcttattactcattttcaggaaagtttgtagtattacaaggcagaaggaaacacagtagcaatggttgctctatattttgtctttcaaagattactgcattaccaagaaacagtagccaaagatgtttgaagatcatgtcccttagctgcattgtgggttattctagaaatccaatgttaaatgcctctactaaagtggggattccccataaaaattgtccagctacctgactcttttgcaataacaactttgattactgaatccatacactcaaactatagtgatatatcagtgtttgggagtgacctctagaaaaaagaaaactgtttttagaaatacataaaatcacttccaaatcctgttgcttatgttgggttaaatttgaaagcaattctctatatataaatatgtgaaatattatgatctgaacttagcacacatgaagcaacatttctttgctacacagaggtgtcttggaaagatttcattcccaattcatttttcatagatctataatcaggcaatttctgcaagcaatgtatgaccccacctgagcaaccacaaataggctctccatgaaactgcaaaggaactgatgtgtggcatccatgctggttttgtctgtctataatatgaattcaagtatctgttcatatttccaattgtctcctgctagcaatatgtgccacaacatgacagtcttgtgacatcttaaggaaaagaagagttcctgttaaatgaatagctttagcttttacaggggattatgattaaaagtgatttagtacatcttacatgatatctcatttctacgtgaaaagaagttatagaatcttcatagagttccatgagaaaaatatacttgctatttatagaaaacgagaaaaaagaaaaaaatgagaaacaagtaagaaaaaatcctttcctaggcttttccttgatcttcagaggcacacagggtttaatggttccttaggttattattttgaggttttgttctttcttttgccttaagtaatgacagaagatatatatggccagacacatatgtataaacttttcagcagcattttaataataaaatatcacactattttctaatgctttgtacaaac

SEQ ID NO: 58779 - DNA, 1865 bp, Homo Sapiens
actggttttgcgagtggaggatgcagtctctttgtggttcctggtcctgtttgagaacctggggtcttgaggtggcctgtctgtgcctctcctttgtttcggcctgggctgggtggtgcttgtgagcatttgctccaggatccgcagacgtttcggtggtgacacctgccacgcacacgtgccgcactggggaccaggaacagggatgagtcaggcacagtccttgccttctgggagctcatggtccagaattgaggattcactcaacagatgtcccttgagcgcagaggatctggcagccccttctcagggggccggggcccaccgatgttgcatgctgagggtattttactttaacacccatggtgtgtctaggagactgaggtttccctggtttcatacttgctatctttcctcacgctgtgcctgtccccagcctggaaggataggtcagaaatccttcaaggtagctgtttcaggagatctttttctggccccaggtcaagttctctttggttccgtcctgagctcattacctcctggtgaatcatcacaccatatttattggacacctacagcttgctaagcattatatagaggcctgtctttgaggaaaggaaattaaacaagccctgtacagatcccccaagatgagaagtagctttagttgaggccactgctgctcttagcttctctggcccatctatgcttctagatggaacgtgtgtttaagatgcagattacaggtgtgagccaccacacccagcccaggctcattcttttaacagccttagcgcaactactaatgccaccaagagcggacaggaaggcctgggtcccatccccttgcgaagccagtaggtgaaacatggcagcttggcctggttccacttgcatcgccttttggtcctcacagtaatcctcagagtggcccaggtgggtagttggttggttggtttttttttttcagacggtgtctcgctctctcgcccaggctggagtgcagtggtgcgacctcggctcactgcaacctctgtctcctgggtttaagtgattcttcttctgcctcagcctcccaagtagctgggactacagtcatgtgccaccacgcccggctaattttttgtatttttagtagagacgggtttcaccatattgaccaggctggtctcgaactcctgacctcatgatctgcccgcctcagcctcccaaagtgctgggattacaggcgtgagccaccgcggcccaacagcgggaagtattttttccattgagtagatgagcagaatgagactcaaggggttgctcagatgggccgggcatggtggctcacgcctgtaacctcagcactgtgggaggccaagggggcagatcacttcaggtcgggagttccagaccagcctgttcaacatggcgaaaccccattctaccaaaactacaaaaattagccgggctcacgcctgaaatcccagcactttgggagactgaggaggggtcacctgaggtcaggatgtcaagatcagactggccaacagaatgaaaccctgtctctacaaaaatacaaaaattaggccgggtgccgtggctcatgcctgtaatcccagcactttgggaggccgaggcgggcagatcacaaggtcaggtgatcgagaccatcctggctaacttggtgaaaccctgtctctactaaaaaaaaaatacagaaagttagccgggcgtggcacctgtagtcccagctactctggaggctgaagcaggagaatggcatgaacccgggtggcggcgcttgcagtgagctgagctcccaccactgcactccagcctgggcgacacagcgagatttcccatctaaaaaaaaaaaaaaa

SEQ ID NO: 58780 - DNA, 511 bp, Homo Sapiens
  misc_feature (502)..(502): n is a, c, g, or t
ttatctatccaaagatatttattgcagcgtggttttcaatactaaacaatgtaaacaatgcaaatatttaacaataaatacagtgattaaataagccatggcatatccagttgatgtaatactttgcaaccattaaattgatgtttacaaggagtttatattgacattggtgatgctaatagcatattaataagtaaaatgtatggcataaaattgtatttgtgtgaatacaattaaaattgaggcatgctttgaaaggttaatagaggaaagtacacatatgtgaatagtggttttatatgagtagtagaattatagacaattttttctttcttcctgcattttcaaatgtaatttaatgaatagctattactttcaaaaatgtaagacaaattataccaagaaaagaaagcattgcttctagtttaaatgcaaatatcctaagaaatacaaccaattatgagctgtcagtacttttcctaagagcaaggaaacagaacanattatgaat

SEQ ID NO: 58781 - DNA, 569 bp, Homo Sapiens
ggaatggggtcttgctctgtcacccaggctggaacacagtggtgcaatcatggctcactgcagccgtgatggagggtggtgctcaaaccaatgttaatttacaaaggatgggagctcagagtgattctcccaagacaagactgccagagggtggggtcctgctcatctgagagatggtgatctgcactggcagaaagcaaaaggacaagattaagtccattctgaagacacccagcattgtggtgtcttggctgcccaacctccactggtgagacgtaaagttcttatgtatatagaaaagcaataaagctccccctgtgcaaatggaactcctaagccagtggtgatgttgagttagaaagtcacagcctattacagacagaatttacaccaggggcaaggcctgaccatcacaccctcatgagagctaccagtcaccagggcttggatgggagcaacacagcggacatatgatcacctctccacaatcacccaaagacagtttttttttgtttgtttttgagacagagtctcattctgttgcccggggctagagtgtgcagtggcac

SEQ ID NO: 58782 - DNA, 2504 bp, Homo Sapiens
cgcaagcttcgcctcttgggttcatgccattctcctgcctcagcctcccgggtagctgggactacaggcgcctgccaccagcctggctaatttttttgtatttttagtagagacggggtttcaccgtgttgaccaggatggtctccatctccagacctcgtgatccgcccgcctcggactcccaaagtgctgggattacaggcatgagccaccgcgcccggtggcttgcatgttttcttaaaaagctacagaaatttccaaatatcttctttcagataatagttggtggagtggcaagtacatcacaagatatgcatacttatgctgcctgcacatttttggctgcaagtatgaaagaagggaagcaaggaattcagagaaatcaagagtctgttcagcttggagcgattgaggcctgtgtgatgtggctactagaaaatgaattcatccagagtacagaagccagtgatggaacagaaggtaagtgtgacttctcagttgcaatttactcactttttcttctttagtgagggtgtatgactgctcagtgaatggaaattgtcttttcatgtagtataaaaggaatttgattttttgagcagtgtatcaactcatttttagtaaatcagtattgtatttagcaacttcagaccattatgatagagcctgctcatacattttcatgctctggataaggtactatttgtaaaatttatcagccgggagggttagcatggaaaacagaaagatagtattttgttttattttattttgaatgtttgttcctctgtttcctcaccctaaccctaaaccaggaaaggtgtatcatccaacacatcttggttcggccactctttcttcttcactttctccagctgatactttagatatttttgctgacctgcaaagagcaatgaagggctttgttttagagaatgatcttcatattctctatctggtaagttctgttttaacaattatgtttgtgaaaatagggagaaaaaaatagatatataatcctgaacatcaaagataccctaacagaacatctcgtctgttttccatgcctaggttagtactggtgggaatagagaagaggtaagaagataattgttttaaagtaataatctaaatgttctagttacctttaaatttattttctccaacctcctttcaaaaaagatttgagttgttttataaaaaatatatatttttacaacgtataaaagaacagcaaagaaaaatgggatatcagaaaattaaagatcggatcatgatgtaaaactcaagcaaaggtcagtacacaaacatgcgtgccattaagtcatgtccaatgctgttgtcaactttgattctgggttttctagcaactaaaagaaagaggaaagcttgattagtgttaatattcataagataaaaaacaaaacaagtttaggaaaaacattgcatttccctgcctaagagaaatttagtcctaaaaggatactttggaacttaacattgtttgataaaaatctctataataaatgcaataaggaattttaaaagtttgtttatattagacaatgctctgtgaatattattttgtataacaaagatattaataagaattggatagtgtttaaggtcatgttctctggcaagaacctgatcagaaataattaattttgtcagttaagagcagatgcatgcattttgataagcaagtgataaggggaggtgagtaaaattgaaattctcattagaatgaagggggcttatcaggaaatgtgtttcaataaaaatcgctatgtagtgagcagaggggaaatgtctagacagtaccaattttcttttattacaaactcgcataatacatgggtgataataggctcaaaggtctgtgcccaagaatgtggctgggaggaatctcaaagcaggtttcaccggtcatctatcatggccttaaaaataagtcatttattatacagtggctaagattgtgggctctaggatcagactgccttagttcaacttttggcctcatcacttagtaatcatataaccttgggtaagtatttaacctctcttacgattccatttcctcatttgtaaaatggagataataatacccacctcagggctgatagtctttgatgaatgtttggtatctgaataaatgtttaataacatctattatttctagtaaattctcccataaacattatgtaagtcatttgccaaattacctaactactcctactcctgttccctctctaaaacgtgaagactgttggcagtgttagtatgctgaatgcttgtggttagtggtcttgtatacttctctcaccattcgagttgtatgcccttcaagagttagttgtgttcccaaacttgttcatgtcagtttgcttctgagaaaattaggctgaggcagaaggatcacctgagtccaggaatttgagaccagcatgggaaacagagcaagaatctgtcgctaccaaacaaaaaaaaaaaaaaaaaaa

SEQ ID NO: 58783 - DNA, 620 bp, Homo Sapiens
  misc_feature (17)..(17): n is a, c, g, or t
  misc_feature (204)..(204): n is a, c, g, or t
  misc_feature (309)..(309): n is a, c, g, or t
  misc_feature (342)..(342): n is a, c, g, or t
  misc_feature (390)..(390): n is a, c, g, or t
  misc_feature (499)..(499): n is a, c, g, or t
  misc_feature (534)..(534): n is a, c, g, or t
  misc_feature (539)..(539): n is a, c, g, or t
  misc_feature (557)..(557): n is a, c, g, or t
  misc_feature (583)..(583): n is a, c, g, or t
  misc_feature (602)..(602): n is a, c, g, or t
  misc_feature (613)..(613): n is a, c, g, or t
aaagtcgccgccctggncgccagcccggctcggtggcagtggactcgggctctgaactcaacagccgctcctccacgctctcctccagctccatgtccttgtcgcccaaactctgcgcggagaaagaggcggccaccagcgaactgcagagcatccagcggttggttagcggcttggaagccaagcggacaggtcccgcagcgntccccgtagacccgtcccagacacgtcttttcattccagtccagttcaggctgccgtgactttgtcggatataaaataaaccacgggcccgccatgggttacctntccttttgcagttgcgtctgggaaggggccccnggactcccttcgagagaatgtgctagagatagcccctgtcttctttgngcgttggtttatatgtccgggatctggatcagattctggggggctcagaaacgtcggttgcattgagctactggggggtaggagttccaacatttatgtccagagcaantttccagcaaggctggttcttgggtctctgcccancaagngggggaggtgttcaaganatttccctcagtgcggatttataaanaaattttcctcactgtgtnagtggaaacanaacaaaa

SEQ ID NO: 58784 - DNA, 241 bp, Homo Sapiens
gcggccgcctactactactactatacggctgcgagaagacgacagaaggggatatatattatgaaatggtcatttttctgaagagaatattttgcttgaaatgcagaggactgaaagagatttgtaggttgttgattttgttagttcatactggaacttttaaaaagatttcatcaaataaagttttgttttctacttataaaaaaaaaaaaaaaaaaaaaaaaaaaagtcgtatcgatgt

SEQ ID NO: 58785 - DNA, 787 bp, Homo Sapiens
ctgcagcaggagcaggagctgttacccttctaatccccacaatgaccccagcctaataatacaatgatccccaagtagaaccaggggcccaaggccccctcgtcagctgggctcccacctccaagctgacgccctcaaccactctgctggggtgagcaaacccaggccccacagctggctagcgggacatccgtgtccacgattggcgccatgtgttttaagttgcagcgtcaaaaacatgaagagattgctttagcaaatatttacccagtcctgactctgcacatggcatcgttctaggagcccaaagatgttaacttgtttaataatcaagccctgtgaaggagtttatagcatctgtggattttggtacccacggaggtgctggaaccaatcgttgaggattccaaggacaactctatgatgcaggcacacctgtcctagctgctcaagggtcgtgggatgcaggtggcacggtgcacgccaagatggctgtgtccacagaggagctggaggccacggttcaggaagtcctggggagactgaagagccaccagtttttccagtccacatgggacactgttgccttcattgttttcctcaccttcatgggcaccgtgctgctcctgctgctgctggtcgtcgcccactgctgctgctgcagctcccccgggccccgcagggaaagccccaggaaggaaagacccaagggagtggataacttggccctggaaccctgaccctgtgtctcctgcccggtggcagtaacaaagccttctgtctgccc

SEQ ID NO: 58786 - DNA, 595 bp, Homo Sapiens
  misc_feature (240)..(240): n is a, c, g, or t
ctgttttaacctgaaataattctgttgatatttgaatcactttcagtgggacatttgctttaaaccacaagatatctccatctccaggtacaaaaatcccttcctccctcccctgccaccccccaccccaccctgcaaccaaagaaacaaacaaaacccaaacccacaactcagcttcaaataagtttgcaagaaatgagactctaaatatttacatatggggcaagaaataaatcacanaactatttacaaaaatacacaagcttatatgcattaacaatttacaccagttcacaaaaatattaagacataaaaaaacactatataaattaaaattaaaaactcaaaagtatgatctaagacttcctaggatgcttctctcatgcaggtcatggttgaaaaatcaggttttgctatctcagaatctaaactgtaaaaccatttttattctttgaacattaacagtactaatcagataaggaaaaaagaccctctgtgcacactgacattatcttgcacacgttataatacaccattcctgacatttctgtaacacacagtgctgaaaatcacatgcctctaaccatgtggaaga

SEQ ID NO: 58787 - DNA, 476 bp, Homo Sapiens
  misc_feature (335)..(335): n is a, c, g, or t
tgggaagaacattttattgctaagcatatccttgaacgaaaatgcaaatatgaactaagaaaagaaaaaagaaaaagcagtaatgtcacaacatcattaaataaattcctttaggttctgctaataaaacaggaatatgatagaagctcacatagagaatgcacatgttcccataaaattgtccaaatagaaacttacactgaaaggaatataacaaatgtattattacttaaattgaaaaaaatgaaagaaagcaggaaatcaattcacaagacctcaagactccaagaacagcaatcttttacagacatcgagatataatcaacttcgtatanggctggccgtttaggttatctaaaatcgtgctttgatatctctttataatcctgtcttttttaatgataacaaaaaaattaattaaactcttaacacattgaaatattagataatgaggaacacctctttccacacacatt

SEQ ID NO: 58788 - DNA, 422 bp, Homo Sapiens
acataatcaaattttatttgacacataaaatgtttaagtgatgtgttttatactttgaaaataaattcatgcaccaatgttttaactcacatatatcatacagtgcaggatttatgaacatacataaaatcaaaatcataccatataaacgtttacaaataagtttttcatgacacacggacactattgctctttaaatatggttgtacatgtcatcattaatcgattcattgttcttccacatggttatttcaatgcaagatccgatcagcatgaagagtctagtacaagataggcagacatggttatcactctgcatcaccagtcacatggttacagaaaacagaattgggactgcatagggactctactgcgggcccaacaacctattagtggattgatgtaaggcattagtaaattgg

SEQ ID NO: 58789 - DNA, 482 bp, Homo Sapiens
cataccacttttttcttttttatttaaaatattataaccaattgacatactagataacattgtttacattccagtggtgcatgtttaatgactagggcatgaatgatgaaaaaccacaataatgatctcagcattccctaaaaagtgccccattttgttttgtctagaggaaaggagagggaacggaacacagggaaggagaggaatggaggaggaatgacatcgcagagggagaaaagcaaatgtcagctatcatactcaggtttccaggtgtgacaccctgctgaccaggataaactgtaatgagaaaatagatgtcacagtccagggagacacgtaattcagtctaacttcattattcagctaaaagattaacagcttctcaaaaatataccaaatattgggcctacaaaagtaatttatttcttcgtaaaatttttactaagatttactccttttgtaaaatgtaaatggaccgatat

SEQ ID NO: 58790 - DNA, 579 bp, Homo Sapiens
tttttttttttttttttacctccaattgatacagccatttctatagtacagagattcaccaaattttcttctttttgaagagcttcatcctaaaaaatactctgcattttcatgatcttttcaatagtttcaagcttacattttttttttaattcactgctcccagtttaaattaaactttaaggattatttttatattccaaaaagtaaagaacacaagtcacaaaatgtagaacatttagtacttttaggttactggggaaactttgtgcactggaaggaaaactaaacgtgggtatatgtttatgaatgcaccgggaagttgaactaatttgtgagaaccaataccatgtttgtaaagcaaaaaacagagacattggttagtaaagcaataaacttggatactgagaactgcttttgtttcaacaggtgaaataaagtcaagcaaatgcttcaaattttgttgtgagaatacctatgacatgatcacattaaattctcaaatgtaaaataattgcagaaattcactcctctttctaataagaagaaacagattttagtttgcttttgcatgtttac

SEQ ID NO: 58791 - DNA, 535 bp, Homo Sapiens
  misc_feature (108)..(108): n is a, c, g, or t
  misc_feature (255)..(255): n is a, c, g, or t
  misc_feature (479)..(479): n is a, c, g, or t
  misc_feature (481)..(481): n is a, c, g, or t
  misc_feature (483)..(483): n is a, c, g, or t
  misc_feature (493)..(493): n is a, c, g, or t
  misc_feature (528)..(528): n is a, c, g, or t
gtgatttaattatggtttatttcacagttatcaaaactaaataaacaacagggtaaaaaatatgcacagattaaatctttaatcagcacaatataagttgcttaagantactctgttcaaaataaaggtgttattaaccacaggaaaagctgtttttaagtaatctgaataaagttttactcagtttcatgactatcaaaaagtcttgatataacactacagacagaattaaggggtttaaattttaggattaanaatttagctatctgaataatttaaatttcaaacatttttctttccctacatttcactggcaaaattaacttcaactattattcaattctcctggattatgcaaaagctgctgaaaatttgatgtatgacacatttggctgacactctattgcaacctatgaatgggtttaactattacacagtattcattttcctttcaaagattttacacaatagtgacagtnananaaaatatgtnttaacaaaaaatcccggaaaatgggcctatatganaaatatc

SEQ ID NO: 58792 - DNA, 511 bp, Homo Sapiens
atttttaattctgttttattttctcagcattaacttagataattctcagaaagcctagcataaattaacagcagagtgtagcatggtggttaacagggcttcttcgcagtgttttattacagctaacttctactcctcagagtctgattcaggggccatctttcaggctagtctagcttcactactgattattctgtcttaggatttaataatgactgtacattgtaagagcagcaaacctcatagttgcccaagttctgatgccaggcaacaatcaccttgcatcatatggttcaggcccttctgcttcccatctcacctggaccagggatagcaacactgccaagtgggaacagcatacttatgatggacttcacccaccagatttgaaactgtgggcggtttcaataatattttttaatttgagggggaggcacaaagtagagacatcatttttaaatcttgttttatatccaagtatctcacatctgcttgattcattatcttaact

SEQ ID NO: 58793 - DNA, 502 bp, Homo Sapiens
caattcttaatcatttattttcaacacgtgtactataaagaacctaagaaatcagacaattttaataacccataaacatgttgaatccatttgcagatttaaattttgtaaaaatagctgtcactgcctccatatatcaagtgtactatgtttataatcacatttatgctaccgatactcctcagaaaaaaacagattctgcttggttctagcttcagtatcatgaactccaataatgccttgaggacctccaaaggaaaaaaacagattctactaggttctagctgaaatattatcaactccaaattgaagctgaagtattatcaactccaaataatgcttcgaggacctccaaaaaaaagagattctgcttggttgtagctgaagtattatcaactccaaataatgcttggaggacagcaatgtagatgattttgtaatcacctttcatcggagtgaccttatataaaaaataagtcaataatttagaggttctaagtct

SEQ ID NO: 58794 - DNA, 481 bp, Homo Sapiens
aatatttgcataagcttaacggctgagcatgcctaagaggaaatgttccaatgagcatttcctttcaataccatgtaagtgctcaaaaagtttcagattttggagcatttcaaatttttggattaggggcactcaacctgtagtaaaatgtaaaatggctcttattcagcataaatagaggcatgcccccatcaggggtcatttcagagttcatcaagattctgagataaaaaagcatgggacagtgaaaacaacaaaattgactttcctgtttcagaagccaaaagtcagacggtttgtatctaattgaataaaagaaacttgaagtacgtaagttaaaacttgaggtgtatcccaaaccatgggagcgttgaagaagcttttgagatctgggtgccatgtttggaacacactgatgtgacaggttgcctggaccacaaaccctggctaggaaatgggcaagagcaagacccaggcatcg

SEQ ID NO: 58795 - DNA, 513 bp, Homo Sapiens
tttattaattgattcagatttattaatttactaattgatcaccctacatttacaggtgttagagtagatatccttaagaataaacataccttatagaaactttaatcagcctgggcaacacaatgagaccccatctctacaaaaaatcaaaaatggctgggcgcagtggctgataggaatatttttgaaagaccttttcatggtactttacaacctgaaaggaatggctttttcttctctcaggagaacatgtaagattaacaagtatttagactaaagcaaaaaaaaaaaaaccttgcagactacaaaaattacttttttttagggaagtgggccgtttttacatattgattgttactggtttttatttcaccagtaaaagtgcttggggagagaaaatctttagagcatttgtttcttttccttccttagtcatttctttttgaaacatttatctttgacaataaatatgagaagaaaagcaacaaacaagcagtgggtttgtatagtggg

SEQ ID NO: 58796 - DNA, 559 bp, Homo Sapiens
ttttttttttttttttttttgacacaatagtactttatttttcacttatccaactgcctcgtacaaatacaagtgggagttgcaaatgacaaaggtttggctctgcacagttttttcaaaaatccaggcttttggtgatttactctgtgtaacacatagcttcccaagtcacatttaatgtcaacatgaaaggctgcacatgggagggttttatgagccaggtttaaaaattgcacatgtcacttccactcacattggaagtaatggccaaaatttaataatacccaactcaaagaaggctggaaaattgcctggctatgtgttcaggacaaaaggaatcaggtttgatgaaaaataaccggtgtcaagcataagcactattatgttctaggcactttgctgggggattcaatgatgagcaaagagcagtcaatgatgaacagagatgacattcaataataaacagtgccctcatgggcttacagtccagcagcaaatacaagttttaaataggcatttccaaatatgatatccattacaaaaggggatgaaagcatgt

SEQ ID NO: 58797 - DNA, 549 bp, Homo Sapiens
aagtacactttttgtttaattccatgcatttgtttgctttgatagtcattcttgttcccattgccgttcaatacagagagggagccggcatcagaaaacaacactgggagctggggactgacagtacaggagaccagaggggagccaggtaaggaggttcattcggagacctaaccacaaaagagaaattcattcgctccaagtcgataggagctcaaattactgtaataaagcgtcaaagagggtcttcccacttccagagtctgggaagtggtcactctgaaggtgaagagccactggggtgatatgggcaagatgggacatcttcctaatagcttgcacatgctggctggggttcccttggcctgcagtcactggaggaccctgtccacctggtcactggacagcagcctagggccgggagccagcgatccctgagtgctgtgaagtggctctggagagcagacctgggatgctgccgggagcttccttacagtggccttgccatctgcttagggctctgctctgtgaagtcctgccatcgtaccc

SEQ ID NO: 58798 - DNA, 4212 bp, Homo Sapiens
gcctgggaggtgcgtcagatccgagctcgccatccagtttcctctccactagtccccccagttggagatctgggaccaacaaggcaccatggcgcagaagggccaactcagtgacgatgagaagttcctctttgtggacaaaaacttcatcaacagcccagtggcccaggctgactgggccgccaagagactcgtctgggtcccctcggagaagcagggcttcgaggcagccagcattaaggaggagaagggggatgaggtggttgtggagctggtggagaatggcaagaaggtcacggttgggaaagatgacatccagaagatgaacccacccaagttctccaaggtggaggacatggcggagctgacgtgcctcaacgaagcctccgtgctacacaacctgagggagcggtacttctcagggctaatatatacgtactctggcctcttctgcgtggtggtcaacccctataaacacctgcccatctactcggagaagatcgtcgacatgtacaagggcaagaagaggcacgagatgccgcctcacatctacgccatcgcagacacggcctaccggagcatgcttcaagatcgggaggaccagtccattctatgcacaggcgagtctggagccgggaaaaccgaaaacaccaagaaggtcattcagtacctggccgtggtggcctcctcccacaagggcaagaaagacacaagtatcacgggagagctggaaaagcagcttctacaagcaaacccgattctggaggctttcggcaacgccaaaacagtgaagaacgacaactcctcacgattcggcaaattcatccgcatcaacttcgacgtcacgggttacatcgtgggagccaacattgagacctatctgctagaaaaatcacgggcaattcgccaagccagagacgagaggacattccacatcttttactacatgattgctggagccaaggagaagatgagaagtgacttgcttttggagggcttcaacaactacaccttcctctccaatggctttgtgcccatcccagcagcccaggatgatgagatgttccaggaaaccgtggaggccatggcaatcatgggtttcagcgaggaggagcagctatccatattgaaggtggtatcatcggtcctgcagcttggaaatatcgtcttcaagaaggaaagaaacacagaccaggcgtccatgccagataacacagctgctcagaaagtttgccacctcatgggaattaatgtgacagatttcaccagatccatcctcactcctcgtatcaaggttgggcgagatgtggtacagaaagctcagacaaaagaacaggctgactttgctgtagaggctttggccaaggcaacatatgagcgccttttccgctggatactcacccgcgtgaacaaagccctggacaagacccatcggcaaggggcttccttcctggggatcctggatatagctggatttgagatctttgaggtgaactccttcgagcagctgtgcatcaactacaccaacgagaagctgcagcagctcttcaaccacaccatgttcatcctggagcaggaggagtaccagcgcgagggcatcgagtggaacttcatcgactttgggctggacctacagccctgcatcgagctcatcgagcgaccgaacaaccctccaggtgtgctggccctgctggacgaggaatgctggttccccaaagccacggacaagtctttcgtggagaagctgtgcacggagcagggcagccaccccaagttccagaagcccaagcagctcaaggacaagactgagttctccatcatccattatgctgggaaggtggactataatgcgagtgcctggctgaccaagaatatggacccgctgaatgacaacgtgacttccctgctcaatgcctcctccgacaagtttgtggccgacctgtggaaggacgtggaccgcatcgtgggcctggaccagatggccaagatgacggagagctcgctgcccagcgcctccaagaccaagaagggcatgttccgcacagtggggcagctgtacaaggagcagctgggcaagctgatgaccacgctacgcaacaccacgcccaacttcgtgcgctgcatcatccccaaccacgagaagaggtccggcaagctggatgcgttcctggtgctggagcagctgcggtgcaatggggtgctggaaggcattcgcatctgccggcagggcttccccaaccggatcgtcttccaggagttccgccaacgctacgagatcctggcggcgaatgccatccccaaaggcttcatggacgggaagcaggcctgcattctcatgatcaaagccctggaacttgaccccaacttatacaggatagggcagagcaaaatcttcttccgaactggcgtcctggcccacctagaggaggagcgagatttgaagatcaccgatgtcatcatggccttccaggcgatgtgtcgtggctacttggccagaaaggcttttgccaagaggcagcagcagctgaccgccatgaaggtgattcagaggaactgcgccgcctacctcaagctgcggaactggcagtggtggaggcttttcaccaaagtgaagccactgctgcaggtgacacggcaggaggaggagatgcaggccaaggaggatgaactgcagaagaccaaggagcggcagcagaaggcagagaatgagcttaaggagctggaacagaagcactcgcagctgaccgaggagaagaacctgctacaggaacagctgcaggcagagacagagctgtatgcagaggctgaggagatgcgggtgcggctggcggccaagaagcaggagctggaggagatactgcatgagatggaggcccgcctggaggaggaggaagacaggggccagcagctacaggctgaaaggaagaagatggcccagcagatgctggaccttgaagaacagctggaggaggaggaagctgccaggcagaagctgcaacttgagaaggtcacggctgaggccaagatcaagaaactggaggatgagatcctggtcatggatgatcagaacaataaactatcaaaagaacgaaaactccttgaggagaggattagtgacttaacgacaaatcttgcagaagaggaagaaaaggccaagaatcttaccaagctgaaaaacaagcatgaatctatgatttcagaactggaagtgcggctaaagaaggaagagaagagccgacaggagctggagaagctgaaacggaagctggagggtgatgccagcgacttccacgagcagatcgctgacctccaggcgcagatcgcagagctcaagatgcagctggccaagaaggaggaggagctgcaggcggccctggccaggcttgacgatgaaatcgctcagaagaacaatgccctgaagaagatccgggagctggagggccacatctcagacctccaggaggacctggactcagagcgggccgccaggaacaaggctgaaaagcagaagcgagacctcggcgaggagctggaggccctaaagacagagctggaagacacactggacagcacagccactcagcaggagctcagggccaagagggagcaggaggtgacggtgctgaagaaggccctggatgaagagacgcggtcccatgaggctcaggtccaggagatgaggcagaaacacgcacaggcggtggaggagctcacagagcagcttgagcagttcaagagggccaaggcgaacctagacaagaataagcagacgctggagaaagagaacgcagacctggccggggagctgcgggtcctgggccaggccaagcaggaggtggaacataagaagaagaagctggaggcgcaggtgcagacactgagtttttagaaaaacatatccacggtaaccggtccctggcaattctgtttacatgaaatggggagaaagtcaccgaaatgggtgccgccggcccccactcccaattcattccctaacctgcaaacctttccaacttctcacgtcaggcctttgagaattctttccccctctcctggtttccacacctcagacacgcacagttcaccaagtgccttctgtagtcacatgaattgaaaaggagacgctgctcccacggaggggagcaggaatgctgcactgtttacaccctgactgtgcttaaaaacactttcactaataaatggttataaatc

SEQ ID NO: 58799 - DNA, 412 bp, Homo Sapiens
tggctaaaatattgctttattcacatttttgtccttggaggaaaatctaggcacactgcaacttggatcgtgtaaataaaggtacaaggaatgttttaagtcagaaaagggcatcacgcagtcagggggctgtgtggacgagctcaatttcgatgcatctcgggagacccgggcaagaggccgcttggattccgggaggcaacgccccacagtcaggatcccttgctcgccgcccccaaccggtcaggatccctggctcgcgtccccaaccggttccgtgtctcacctgggtcctgcaggcgtccactggaggaagccggatggctgggcttggtctttcaggaaggctggctggcaccgggcttccttctggctccagggggaaccgtacagaacggggagaaagggggaa

SEQ ID NO: 58800 - DNA, 2732 bp, Homo Sapiens
ggagccgcgccgcatctcaggcgcagtctctaggggctgtgcgcatcctagggggggacatgtgcatctcaggggggctgctcgcatctggggggtgctgtgtgcatctcgggggggctgttgcatctacgcggggtggctgtgtccgcatctggagggggctgtgcgcaacccggggggggtgttgcgcgcatctagcaggggcggctgtgcgcatttcgggggggggctgtgcatatctggggggacacgtgcttatctctgggggcggctgtgcgcatcttgaggggtgtgtacatctcggggggcctgtgcatcttggggggctgtgtgcatccgcgggggctgtgcgcatctcggggtgctgtgcgctgctcctctgagctctgctctttcttgcagcgtttgcctcagccatggagggcggggccgcggcagccacccccacagcactgccttactacgtggccttctcccagctgctgggcctgaccttggtggccatgaccggcgcgtggctcgggctgtaccgaggcggcattgcctgggagagcgacctgcagttcaacgcgcaccccctctgcatggtcataggcctgatcttcctgcagggaaatgccctgctggtttaccgtgtcttcaggaacgaagctaaacgcaccaccaaggtcctgcacgggctgctgcacatctttgcgctcgtcatcgccctggttggcttggtggcggtgttcgactaccacaggaagaagggctacgctgacctgtacagcctacacagctggtgcgggatccttgtctttgtcctgtactttgtgcagtggctggtgggcttcagcttcttcctgttccccggagcttcattctccctgcggagccgctaccgcccacagcacatcttctttggtgctaccatcttcctccttcccgtgggcaccgccctgctgggcctgaaggaggcactgctgttcaacctcgggggcaagtatagcgcatttgagcccgagggtgtcctggccaacgtgctgggcctgctgctggcctgcttcggtggggcggtgctctacatcttgacccgggccgactggaagcggccttcccaggcggaagagcaggccctctccatggacttcaagacgctgaggcagggagatagccccggctcccagtgatgcgcccggccggccctgggggttcgcggggtgtcttcttgcctgcccctgctgaggcgtcttcaggactgcaggctccggagagtggctctggcagcaggcgggcgcgtgggtgcagggggatccgtttgatgcgtcgtttctggggcaggtctccgcctcctctgcttctcgtttctccgctgctatagaccagttcattgtgtgtggctcccgtgtctctgttgcccccttcagtgcagaaggctttgggtagacttcgggtgttcggtcctggtcgcagagcacagatctttaaagaagcgttagagaggtaggttctaccctcttggtagtagatgcctggggcaaggcccaggggaaactgggggggcctcagggacaggcctggaaaggccacgatggcctgctgaattcaaacaaggagtccctccagcctgaataacacgtggcacaaatgggcccggcctttggcagaggagcaagtgatatgatgtgtaaagtatgttggtggtgaaagcaaggttccccaggagaggggagggactggcccctgggaagctgtgagatgaggctgtggcccagctgtagtcctgaccttactcttctttaaaaccctttagccctaggatggctttggtgggagaggggatagaagcccatgacttcagacagactttctcttggcagatgcaggcaggcctcctcccaggctgctccagacatgggggttggggatggggggtaccttgcagccccttcctgctggggctccctccttgtagcacccccttgcggctcagctctggtttcctctcccaggctcacccaggctctgctcaggctgggaggcagagggcacaaaccttataattttttaaatgaaaaaccgctgctgctggctgtggctagagccccctggggctgctggagctgctgcctctgttctggaggacgagccttctccttatctgctgcccatctttccaggaagtcaggatggagtcagacaactaacgatcatcccccgtgggtgtctgcacatcactccagccccataaagagtgtcatgttagctgagtcaccatttggcttcggcctggaaatagtgtgttagaacactgatcgtgtgcgaggccaggagatcaagaccatcctgactaacaaacacagtgaaaccccgtctctactaaaaatacaaaaaaattagccaggcgtggtggtgggcgcctgtagtcccagctacttgggagacaggtctctacggaattccctgtattagtctatatggttctccaagaaactgaatgaatccattggagaagcggtggataactagccacgacaaaatttgagaatacataaacaacgcattccgcaggaaacatacagaggatgccttttctgtgattgggtgggattttttccctttttatgtggatatagtagttacttgtgacaagaataattttggaataatttctattaatatcaactctgaagctaattgtacataatctcgagattgtgtttgttcataataaaagtgaagtgaatgtg

SEQ ID NO: 58801 - DNA, 510 bp, Homo Sapiens
tttttaaaaaatgaaacaagcatttttttttattattttcttagaaaaggcggcgagaatcctgagtggaagggatctaccctcttcatgtcatgtacttcgagaagagggtagatgagactcaagaatgataatcagaccagtcctactcctcccaacccccaaaagatggcatttacacatcacggaaacctatgggtctaacaggttattctctctctctcagttcttgggaaaagggagacaagccctcggccagattcctttagggaagagttctctgtgccggtggctggagcttgcggtgcgtgctcagccaggaggccccagccaggcacctctagactccgatgtgccacagagggcaggggctcccgctgtcacttccattttagaccaaacagctcctgggtgcagcgactctttcaccctctcttcagggtggggagaaaacgggtggactggagcccgcgcggccctcacgaactctccctgagcagccccagcttc

SEQ ID NO: 58802 - DNA, 705 bp, Homo Sapiens
  misc_feature (19)..(19): n is a, c, g, or t
tttttttttttttttttangtttcacaatttgtatggctgattctacgcacatttaaatgtgtttatgacaattgtagatttcggttttcctctggttaaaccaatgtggaagtacacaggatgggagctgagagacaagcatcctgggcccagccatgctggcctcagtgggccaagctggggacagatgacctctgctccgtggatcctgctggctcagggtggggaaggggcctcaggagaggagtcaggctctcttctttattctcctcacagccatggtgaatggcattcctgggaggctggtttggagaactcgctgaaccatgctctgcatccagtctaggtggctcctagcggggcttggtgggttctccatcctcagcaccatctgcagcaccatcttggtcatctgagaagctttgacctgaaatagacaagatgcaagatctcaggattgtcagggaccttaggaaccatctaggccacatcccggctttggcctgaagtgcaggcaaagggtttgcctctgccagccatagcatccagctttgctgtcggtggaatcgggcctgtatgtgagttaccagggttgcagaggacactgtggtctgggtggcagtctggtgccacatggcagaattcatcacagtagaacttccctcttgcgtggtgatccgtccaagacacaaggtctggggtgg

SEQ ID NO: 58803 - DNA, 479 bp, Homo Sapiens
tttttccatcttttaaaaaatgctttatttctctggcaggcttcatcggaatcacaattttcattcatttagtaactgttggccttgtatccacccctctctggcactcaggtctcacttaagagctggctgtctgagctgtgatttgcgatcagtgagatggagacagaggcagccctaggcagtcatgttttgttccacctgaccctgggcgccactccccctcccaggctacaggcaggcatgggcaccagccagggagagacagctcatccatactctggcccagcagaaactctgggcttagacaaaactgctcaattgaggacaaactgggcaaagtagaatctttctttgggagtttttagaaatatggtggggtggcatttgggaataataagaatagtagctgggcatggtggtacgtgcctgtagacccccagctctggaggctgaggtaggaggatctttggagccca

SEQ ID NO: 58804 - DNA, 479 bp, Homo Sapiens
acaggcccatgctcacgaggtctttattggaataaataacagcatactgtgacgccacgtggcattgtcctaaccgcatccctggcggaagaagtgtttgcccggtgttgcagtgagctcctgaaaagcgcttgcttcctgcactcagccaggtgggcctgacaaacagcatggccagggttttcgtggcttttatataacatccagaaatccaaagtaaacattgcttaaaacaattaagaagacagtaaaatactggcacacaaaacagggggaaaggattcagttgctttaaaataaaattgctctttgtcaccaagacaattaggacaccacggcccagcgggactctgggctcggtgcttgcataacactgtgtgggcgtcaaaggggaactgaagctgcgggaggctcccctagctggtgtgggttgagagacacgtcacatggagaaggagaatcagcaaataccttcctgc

SEQ ID NO: 58805 - DNA, 1144 bp, Homo Sapiens
ttttccgactgcttatccgacgctcctccctctgtctctgtagctggagaaggtagtttccaggaaagttttccggtttgcaggccgcgcacatcgggcaggggccatcctcggtccccttgctcgttgctcgcagccccgttcggctacaagtgagtttcagggcgtcatggccaggggccaccgcggccagccgggtgtgaggctgcctttcgctgcccgcgcgctccagtggtctctgggtccgccggcgtccgtttcggcctgaacgcagcccctccgcggcgacgagcagtctcgcgccggagctcatggcctcggaggcgccgtccccgccgcggtcgccgccgccgcccacctcccccgagcctgagctggcccagctaaggcggaaggtggagaagttggaacgtgaactgcggagctgcaagcggcaggtgcgggagatcgagaagctgctgcatcacacagaacggctgtaccagaacgcagaaagcaacaaccaggagctccgcacgcaggtggaagaactcagtaaaatactccaacgtgggagaaatgaagataataaaaagtctgatgtagaagtacaaacagagaaccatgctccttggtcaatctcagattatttttatcagacgtactacaatgacgttagtcttccaaataaagtgactgaactgtcagatcaacaagatcaagctatcgaaacttctattttgaattctaaagaccatttacaagtagaaaatgatgcttaccctggtaccgatagaacagaaaatgttaaatatagacaagtggaccattttgcctcaaattcacaggtaataaaatgctaaacatgaaactgttgatgcccaagaacctgtccttctttgttgttattatgtggaaagatagacttctttggtccgtcacagcatatataagggttataaacattcttatgtgtaattatgcaaagaatgttgtagtttttccaaaaccagaattagaacttcttcatatatgtagtggttttcctactacattgtgttccaaaattttgtgatctacataaactaaaacaaaatttgtccagatattttgactgaacaaaagaactgtggacaacaataccacatttacacctaaaaaaaaa

SEQ ID NO: 58806 - DNA, 2455 bp, Homo Sapiens
gggagggtttttttttttaattgtttctttgatgtttctggacagtaaatatttgaaattttcctaggatcagtaatgaaggtacacaaagtactttgggtagctataaagaagactgctgcatgtgatatgtatattcttatgagaacatttataaaaaaaggttgcagtgaaaatggaataacttaacctataatcattttatatattaaaaattgtataagcctctttcattacagaaatattcaatctttataaaccgttttactagtttacttgataagatgttggtttgtttcaaaatcttgtttcattatatgtcccctttttatatgcttggtaagagatggaagtcactagaggtgagagatgttaaaagtaggaagcatttgatctcgttaggaagaagatgtgaaatttccttgaagaaagtttcaataataaggtattaaacatgttcctggggttggtcaccattatctcctattcctctttcttttccccttcctatcaccctttcccatccattttatgttgagagttctttcatttatagagaggattttttaaactaattcatattatgactttaaagggttacagtaagtttgctttatcatttgatcctgtaaataaaaaagattttgagctgcttcctctggtatagaatatctgactataccaactaaggattaaggaaaggatgaaaagaaagcttgaatatttaatagtctaaaaatattttaaaaaattaaaaaccttcaaatcttggtaaccatttttattctgttcaaataaatgcatttggtattctaaatatttttgtagtgttctatactaacagctagtaagccaattttttgggggtctttgttaaaacgataagttaataacttggtgattttaccatgggatattccattttagaacaagaactcagggagaaccataataaaagaacaaaagttttaaatggtaaaagtcaaatccttggtccgtgagcacataccatgatcacttagttaagtgaatttgtgtaatgcttccttagccagatcattccttattctttgttttttattttttatttttgagacggagtttcgctcttgtcgcccaggctgtagtgcagtggtacagtctcagctcactggagcctctgccttccaggttcaagtgattctcctgcctcagcctcctgagtagctgggattacaggcacacaccaccacgccctgctaattttgcatttttagtagagacaggatttcaccatgttggccaggctggtcttgaactcctgacctcaagtaatctgccctcattggcctcccgaagtgctggaattacaggcgtgagccactgcgcccagcctgttccttatactctttaaaggtttgtttttgctcctccctctttaccctcccctccagtgaatgttttttagaaaaaccaatgctcagatttatcagtattactaccgttctgtactggcttactctaatggtgttatgagttatacattatacattagtataaaaacattcaaaagggtactctttatgctcagtttattaagttttatgctgtgcgggatactgttaggtgctatgttaattcagtagcataggaattatagaatacctgtaactaataggtagaggttagcttgtttcagtcacagtagctttattgtagcattgctgttaaaatgttaatcttttgttttccagatggctattgatcaggcccacaggcagaatgtctcctctctttttctcccagtgattgaatctgtgaatccctgcttaattctagtggtgcgtagagaaaatattgtaggagatgcaatggaagtccttaggaaagcaaagaacatagattacaagaagccactcaaggttatatttgttggagaagatgctgtggatgcaggaggggtgcgcaaagaatttttcttgctcatcatgagggaattattggatcctaaatacggcatgtttaggtattatgaagattccaggctcatttggttttctgataaggtaaaatgtccaaccatctaaattacttctgtgtatatacccatgtatttatacctgtatgtatcaagttaattcagtaaataaggaattactactggatccctaacatataagatctgctttattacaatttgagaaattataaactttggacttggagttgtcaaaatacatttgatgcttaccacacattttaaattaacaaaataaattaagagatggttagccagaaaataatgttgactattccttctgctgatttcaatttgaggattgaataataatcaccagattaacttttctgttgggaaaaattaatttatcattagggatcattgatttatctaccttgtcatttagagcaggtcagcggactatagcccattaatctcaaaaaaaaaaaaaaaaaa

SEQ ID NO: 58807 - DNA, 566 bp, Homo Sapiens
  misc_feature (287)..(287): n is a, c, g, or t
tgtttctgattaagtacttgctcacttttccaaagtttaatttttgctttgaacaccaaatctttgtcagttcacattagttaattttgacatggtccttccaaatttctattaactatattcagggatccaaagagtcagctaatctttccatagatctgccaggtgagaatcattcaaggaaaaaatcttcaccttttaaattttttttgctacaaacttttgaaactattcttcctttggatcagctcccacacttaagtatgaaatagcagaaagggatgttntgatcccttgtctttacacaaagctgaaaacaggtgagaggttagtgccttgtatgtaattaagattctgagtatgatactgatagtatcatttccggtggaaatcagaaaggcaaactcttaaaaatgagggcttctctgtgtaaaatagtaaatgaaataatgtactacttgaatcttagggttttcagaacaaaatctagatgcaaagcccttatatatttctatcactggggcttcactcacttcaccagacttaatggtttaaaaatttcttta

SEQ ID NO: 58808 - DNA, 544 bp, Homo Sapiens
  misc_feature (499)..(499): n is a, c, g, or t
  misc_feature (529)..(529): n is a, c, g, or t
  misc_feature (538)..(538): n is a, c, g, or t
cccctaaagaggagccagatatctgaattttaaagtaaaatccccccctattttcaaatgtgggaaacgaatcacattgaaacaatagtgaacaactacacagaagaagacatacctgtggtccttggaacagaagagcacaaactagaaaaagaccagaagtctgctaactatccctcccttgggcctctctggtttataccttcaagccaccccactgctcagggaacatgactggtggagaagatctagtgatggaggatgattctgacagtcttcagtaaatactggaggctttagtgaaacagttacttttaagatttcactgttaaaaaaaaatcatccctgaaggtagggttcctatgtcttctggatgagagaaggatgctttgtgttcggtctagatgttaactggagaggactggatggccctcttccattaaagggccagacggccctgctactttctatcccatgtgcttggctgaagtgaccaganggagactgggtgaagcactcactgtggcanactactgancattcc

SEQ ID NO: 58809 - DNA, 437 bp, Homo Sapiens
ttcagagtccatgaggcattttatttgtaaatatatgtattacatccctagaaaaagaatcccaggattttccctcctgtgtgttttcgtcttgcttcttcatggtccatgatgccagctgaggttgtcagtacaatgaaaccaaactggcgggatggaagcagattattctgccatttttccaggtctttgagttgcacgtcaaatctggggctgatcaccccacacttgtttagcctgcctgtgaggttcacaacaattttcccagctctgtggtcatcaatgatttcaaattcgccaatgtaaccatgcttcatcatcacagtgagaaaccggacgatgactttggagcacggcctaataagcacctggcgtttgcgtctcttttcgggattgttgatactcttgagagcatctgccagggaattcatgcgcac

SEQ ID NO: 58810 - DNA, 2033 bp, Homo Sapiens
gaattccgggactgagctcttgaagacttgggtccttggtcgcaggtggagcgacgggtctcactccattgcccaggccagagtgcgggatatttgataagaaacttcagtgaaggccgggcgcggtgctcatgcccgtaatcccagcattttcggaggccgaggcatcatggaccgatctaaagaaaactgcatttcaggacctgttaaggctacagctccagttggaggtccaaaacgtgttctcgtgactcagcaatttccttgtcagaatccattacctgtaaatagtggccaggctcagcgggtcttgtgtccttcaaattcttcccagcgcgttcctttgcaagcacaaaagcttgtctccagtcacaagccggttcagaatcagaagcagaagcaattgcaggcaaccagtgtacctcatcctgtctccaggccactgaataacacccaaaagagcaagcagcccctgccatcgcacctgaaaataatcctgaggaggaactggcatcaaaacagaaaaatgaagaatcaaaaagaggcagtggctttggaagactttgaaattggtcgccctctgggtaaaggaaagtttggtaatgtttatttggcaagagaaaagcaaagcaagtttattctggctcttaaagtgttatttaaagctcagctggagaaagccggagtggagcatcagctcagaagagaagtagaaatacagtcccaccttcggcatcctaatattcttagactgtatggttatttccatgatgctaccagagtctacctaattctggaatatgcaccacttggaacagtttatagagaacttcagaaactttcaaagtttgatgagcagagaactgctaacttatataacagaattgcaaatgccctgtcttactgtcattcgaagagagttattcatagagacattaagccagagaacttacttcttggatcagctggagagcttaaaattgcagattttgggtggtcagtacatgctccatcttccaggaggaccactctctgtggcaccctggactacctgccccctgaaatgattgaaggtcggatgcatgatgagaaggtggatctctggagccttggagttctttgctatgaatttttagttgggaagcctccttttgaggcaaacacataccaagagacctacaaaagaatatcacgggttgaattcacattccctgactttgtaacagagggagccagggacctcatttcaagactgttgaagcataatcccagccagaggccaatgctcagagaagtacttgaacacccctggatcacagcaaattcatcaaaaccatcaaattgccaaaacaaagaatcagctagcaaacagtcttaggaatcgtgcagggggagaaatccttgagccagggctgccatataacctgacaggaacatgctactgaagtttattttaccattgactgctgccctcaatctagaacgctacacaagaaatattttgtttttactcagcaggtgtgccttaacctccctattcagaaagctccacatcaataaacatgacactctgaagtgaaagtagccacgagaattgtgctacttatactggaacataatctggaggcaaggttcgactgcagtcgaaccttgcctccagattatgaaccagtataagtagcacaattctcgtggctactttcacttcagagtgtcatgtttattgatgtggagctttctgaatagggaggttaaggcacacctgctgagtaaaacaaatatttcttgtgtagcgttcttaggaatctggtgtctgtccggccccggtaggcctgttgggtttctagtcctccttaccatcatctccatatgagagtgtgaaaataggaacacgtgctctacctccatttagggatttgcttgggatacagaagaggccatgtgtctcagagctgttaagggcttatttttttaaaacattggagtcatagcatgtgtgtaaactttaaatatgcaggccttcgtggctcgag

SEQ ID NO: 58811 - DNA, 478 bp, Homo Sapiens
atttttgacaaacactttttaatttcagtaacagtagggaaaaataacagcatccatgcattaaaactaagagccttcacaaagacgtttcaagatgtattttgaacaaaagaggacaggctcttgggacccctctgggtcctgcctcagcacatcgagtcctcaaatccgagtgaggaaagtctggggagctgcactgtggagccatcagaaagtacctggagcggctgctgctgggctggaaaagccgcagaagtcctcggcggtagctgggttgctatggcaacaggagtcccaggctgcccgtgctttctggccacaacctttacctcatcattaatgacttcaaagtgctcctcttcctcttcttcaatgtccaaatcattctgcctaagatatgcttgtaatggtccatacagtctctccttgaaagctaagaaatccatcatgttcccttgaaagtgttgcaagaaaaaca

SEQ ID NO: 58812 - DNA, 491 bp, Homo Sapiens
ttgatttaaaagattttattttctttatgcaggtaggcagttagaaatttcaaagtctaacaatgacattcttgaagtgggcacagccttttaaactcaggctatgtatacagtaaccttgtggaactggttcagccagatcttcactttcatgaaagcacagggtctgtccttttctttccagagggctcctctcatattccatcgccagtttctaagaaagaaggtggattacaatcagtgctccattctggtctataccgcttcttgtttagggtatgaaaatacatgtgactaagacctggtcactccaagtccatcccctttatcggtacggccaagtaccgataaacggagctgggaaacttcccaatctctaataagacaactttaattctgtacttttattgaatcccatattgtacctgcgttggcaaaatgtttaaccttcatctaaaaatgacttcatgtcacagtaaacacagaagaca

SEQ ID NO: 58813 - DNA, 598 bp, Homo Sapiens
aaaagctgataaactagcctgcaccctcctcccactgcaatgtctagttaactttgtaatcccacaggttttctttttgctccattgagaaagccacttttaatattttaaagttgctctctgtaccacccccaccttccccccatgcctcctaaggaatcaaagttcaaaccagactctgagtgggggatgggtgagattatcagaccaagttagttctttagattgcttagaggcccagaagggtttcaagccctttgaaggggtatttgggtggcacctggcatcctttgtttctggcaacagagtgcactcagcactcctggggggcaagggcttcctcccatccttggcttatggaaagccatcccagatcaggccccccaactctccagaacaggctacaaacatgcaaattagaattcttttaatataaaaaaaagtactaaaaaaaaaaattcactggccgtcgttttacaacgtcgtgactgggccctggcgttacccaacttaatcgcctttgccatccccctttcgccagctggcgtaatagcgaacaggcctgcaccgatcggcctttccaacagttgcgcgcctg

SEQ ID NO: 58814 - DNA, 849 bp, Homo Sapiens
gaacaaaggtctctggttttcctaggcagagtgtgtgtgtccctgggtacttgagattagggaatggtgatgactcttaacgagcatgctgccttcaagcatctgtttaacaaagcacatcttgcaccgcccttaatccatttaaccctgagtggacacagcacatgtttcagagagcacagggttggggataaggtcatagatcaacaggatcccaaggcagaagaatttttcttagtacagaacaaaatgaaaagtctcccatgtctacttctttctacacagacacggcaaccatccgatttctcaatcttttccccacctttcccccttttctattccacaaaaccgccattgtcatcatggcccgttctcaatgagctgttgggtacacctcccagacggggtggtggccgggcagaggggctcctcacttcccagtaggggcggccgggcagaggcgcccctcacctcctggacggggcggctggccgggcggggggctgacccccctacctccctcccagacagggcggctggccaggcagaggggctcctcacctcccagacggggcggcggggcagaggcgctcccatctcagacgatgggcggccgggcagagacgctcctcacttcctagatgggatggcggccgggcagagacactcctcactttccagactgggcagccaggcagaggggctcctcacatcccagacgatgggcggccaggcagagacgctcctcacttcccagacggggtagcggccgggcagaggctgcaatctcggcactttggggggccaagacaggcggctgggaagtggaggttgtagccgagatcacgc

SEQ ID NO: 58815 - DNA, 590 bp, Homo Sapiens
  misc_feature (557)..(557): n is a, c, g, or t
cagtgactgataaatctttaatataaaaattgtacaagaattttgatacaaattacaagaggtatttggacaaaatatgaataaaattccatttacatccccaaacccttatgcattttatgcaaaagacatactgtaggcagttatagtacagaaaatacaaccaaagtaacagcaaattaaaaaatttaattaccttagcctaccaataaaaacaaaaagcaaaacagaacaaaacaaaaaataaaaccctggttcaaggtacatacagtatttaggaagctaccaacgtcacaatgattagatcagggtgatgcacactgtcccatcccttggtgcagttaccttttgaagtacagactttgattctgcggcaggcttattgcaagagactggttttatgcagatgagaacaatataaacaaaaaaaaggaataaacagctaaactctgggagagggagaggacatatcttagtgaaaattccttttcttcaagatatttcaactccctctggccacttttgctgtcaaatatggaggctgagtccaataattntgttactggagacacaccaatgggtctggagta

SEQ ID NO: 58816 - DNA, 1156 bp, Homo Sapiens
atgagtgtggcaaagcctttggcaagcagtcaacacttattcaccatcaggcaattcatggtgtagggaaacttgactaatgtaatgattgtcacaaagtcttcagtaatgctacaacgattacaaatcattggagaatccataatgaagagagatcttacaagtgtaataaatgtggcaaatttttcagagatcgttcacatattgcaggtcatcggtgaactcatactggagagaaaccttacaaatgtcatgactgtgccaaggtcttcagtcaagcttcatcctatgcaaaacataggagaatttatacaggagagaaacctcacaagtgtgatgattgtggcaaagcctttgcttcacgttcacacgtcattagacatcagagaatctatactggacagaaatcttacaaatgtcatcagtgtggcaaggtcttcagtccaagatcactccatgcagaacatcagaaaattcatttttgagataaccgttcccaatgaaatgagtatagcaaaccatcaagcattaattgacattggagtcaattcagcattgacttgagtttgtgttgacttaacattgagttcaagcctttattgacattcaagtgtttatgttaagaggatggggccaggtgtggtggctccgacctgtaatcccagcacgtcgggaggccaaggcacataggtcacttgaggtcaggagtttgaaaccagcatggccaacagatgtgagccacttttctcagcctgttttttgtttcttattttctattatttttttgagccagtactttttaaagagatagtacttttttcagttagtactttttgaaagggatatatcatagtaatttttaaaagggatatgaggccaggcacggaggctcatgcctgtaatcccagcactttgggaggccgaggcaggcagatcacggggtcaggagatcgagactttcctggctaacagggtgaatccctgtctctactaaaaatacaaaaaattagctgggcatggtggctggcgcctgtagtcccagctactccagatgctgaggcaggagaatggcatgaacctgtgaggcggagcttgcagggagtcgagatcgcgccactgggctccagcctgggcgacagagtgagagtctgtctca

SEQ ID NO: 58817 - DNA, 497 bp, Homo Sapiens
ttggtgtaattttttttaatggtgaagctataggaattgactgtagagataccatatcaggatgtgggtgacctgcctgtctgcatctttgcaggtcctggaacaacctgtactgtgtgctcaggaacagtgagctaaccttctacaaggatgccaagaacctggccctggggatgccctaccatggggaggaacccctggccctgagacatgccatctgtgagattgctgccaactacaagaagaagaagcacgtctttaagctgaggtgaggccttcctggcctttgaaagctcgggttgatggcttgatttggcattagtggcagggcagaggccctctgtaggggaccagtgccaggcctgagctgctcctcaggggtttttcaaatcaaagaggctgatggtccagactttgacctctcagaaagtgctgggctgcctgagaggggtctggatgttcggctcagggtattgtgggatcagagccagccctct

SEQ ID NO: 58818 - DNA, 2124 bp, Homo Sapiens
aaatcatttaatttaaggattgcagcttaagacttggcatacggatacttggatgacactgatttcttctgtagctgggcaaatcagtttcctcaccaaaagtgaatatggtaaaattacatgtttatatcatatgattgtgagactcaataatagtttgagagctcagtattatctttgtaggaaagacataatttccaaatttgattagaatttgaaaataaatcacattttgatcattgctagatactgtgtctaaatgtggaaaaacctttgagaaggatttttgtatttttttttgactatttcaagtcaatagagaaaagaattctgttgaaatcagtgaagtggtgataagtagtgggtggaagattacagctcagacttaatgggatagatttggaatattatagatgggtgaatttattacaaagcaaatattaccccaaattgtcctctaagaaaatcctcccccaatctgttaatgaaaaaaaaattgtggtacaatccttataaaatttaccattttagccattttaaagtcttaatgccagttcagtggcattaagtacattcattttgctttgttactatcactgccatccatctccagaaagcttttcatcttgaaaatctgttaccgtacttatttaacaataagtccttatatccctctctcctcagcccctggcaaccaccatcctactttctatctctgaattcgactcttctattaataggtacctcatataagtggaacatagagtatttgcccttttttgtgactggcttatttcacttagcataatgtgcccaagagtcatatatgttagcatgcgtcaggattttatttcttttaaaggctaaataatgttccattgtatgtatataccatattttgcttattctttcaccttccatggacatttaggttgtttctaccttgtaggtactgtgaatcatgcagccataaacattggtgttcaaatatatgttccagcttctgctttcaattcttttgcatatatacccagaagttaaattgctggatcacatagtcattctatttttaatttttttgaggaactgtcatattgttttctatagtggctgcaccaccaaaattttgaatggagagaatgtcagcatcctgtttaataaattattttaaaaatcagctctgagcaaatgaatttagaatttggaatatttgaccaaaaatcagttttacacgtacatagtatgttactgataaaggaatgactagagtagtacacctacagttcttgctggccagagccaggagggggtgtaaaggaatttcctgggtttaaaaaagcaggcagcattgatgaatcatgaagttccccctacctcctttaatggttttgtaacaaagagatgcattcaggtgaaagtttcaagtctttttgtaactatagaataactgttctttttgtaattgtagaattctttaactttttttaggctgaagtagagaacatgaatcatttggtctgaaacttttgagaccctatttggtttgcttacatatgtgaaaatagttatccaaataattgcgattgctatcaaataatttcaataatatcagttacttcttttggtctagagtcttctcctccttaacctctttctttttggcgagacagggtctcactctgttacccaggctggagtgcaatggagtgatcactgcccctttgaacttctgggctcaagtgatcctctcacctcagcttcctgagtaggtgggactacagatgtgtgccaccaagcctggctaattaaaaacaaatgtttaagccaggcatggtggctcacacctgtaatttcagcaccttgggaggccgaggcaggcggatcacttgaggtcaggagttcaagaccagcctggccaagatggtggaaccctgcctctactaaaaacacacacacaaattagccgggcatggtggctggtgtctgtaatcccagctgtgggaggttgaggcaggagaatcacttgaacctgggaggtggaggtttcagtgagccaagatcatttcacctcactccagcctgggtgacagcgtaagactctctcaaaaaaaaaaaaaaaaaaaa

SEQ ID NO: 58819 - DNA, 516 bp, Homo Sapiens
tttttttttttttgacataataataactctaacatttattgagcttttgcttaatgccaggaactgttctatagacattatatgtattaactcacttaatcctcgtaacaatagtatgagacaggtatttccattactctcattttacgtctccacagtaataaagcagagaaggagtacataaccacccaaagtcactagaagaaggtggaagaagcaaaattcaggtggaggtccgagatgcttctcttccccactgtgtctgccacctctagagtgaatagccatgaccctgagataagtcagttacacacattgtaccaccgatttctaaaacaaccatatgagagaggtaccagtattatgcccattttatagatgagaaaaaggaggctaggaagggtgaaggaattcatctatggacagaggatttgtgccctctcttttctcttctacagagaaattgagccaggatttaatcccagcatgccggtttacaaagcccagctttataac

SEQ ID NO: 58820 - DNA, 565 bp, Homo Sapiens
  misc_feature (393)..(393): n is a, c, g, or t
  misc_feature (395)..(395): n is a, c, g, or t
  misc_feature (400)..(400): n is a, c, g, or t
  misc_feature (447)..(447): n is a, c, g, or t
  misc_feature (466)..(466): n is a, c, g, or t
  misc_feature (507)..(507): n is a, c, g, or t
  misc_feature (538)..(538): n is a, c, g, or t
  misc_feature (540)..(540): n is a, c, g, or t
  misc_feature (553)..(553): n is a, c, g, or t
aatggttaaaatccagattttttttattaatgataaacttcacccgtcactgtacattatgcattgagatagtaactaatgatagtatgaagtcatcacaattagcaacaggttttcaaataatatttatttcaccctcaagcttggtttgaaatttctgtccttacgtatgcttcataatgtacctaatcattgttcgtgggttcatgcatatgcttataaatgtgcatatattggggtgcatacaaaaaaacattttatagacaggaatgtgctgaaaaaatgtaatgaattagacagtagaaagaaccaactatgtgctccaagccacacaaatgcctaagaatttggcgtttgtttgcggccatagtttgagtgcttctcaaatgtacngngcatncagatcacctggggatcttgttaaaatgcaaattctgaatcaataancaggaaggtgggccctganatcggcccaacttccagaagataaaaagctgctggttccangccacacttccgagggccaagaccttaaccntnctgggatggtaangggcatgtgcac

SEQ ID NO: 58821 - DNA, 545 bp, Homo Sapiens
  misc_feature (13)..(13): n is a, c, g, or t
ttttttcaggacntttcaaaacctttaatatgttttgccttctgaatccctgggagggaaacaacgtaatgtacagcaaactaatttcaccaagaactctttcccccataaaacatcatgtgtcccactgtatatacttcaggaaatgtgctattatttcacccaaacaggtgaatttatcagagtccccaaaagaaatagaaggctatttcaagtggggacatttgagaagagtgtaataaaacaactacagtatttacaaatggatgaacagggggttaggtaaagcaacaagttgtagtgaactatactggggctagtaataactgtaagctattaccaaccctaagtgaaaaggggtaaagggagggagcaggaactaaacctagtgaggtaactggggtaactgcttgggaacagaagagataggattcctgataaggtactatttagtagaggaacacagccaactgatgatgacatggcaggaaaggagccagggaaataaataacatcatttcattttcctctcaacttctaatctc

SEQ ID NO: 58822 - DNA, 590 bp, Homo Sapiens
tttttttttttttttttaactatggaggatgacacatcaaaactttttcttaaaaaagcatttaatgctttaagtctatttctgtatttatttaggctcatctaaagggtcttgtgtgttatggggagagggtcagaaatgaaaacaaaattataaaaggtgaaataaagaaaaatcaaagaaaggttgcagaacacagggtggaaggaaaggaggtgggtggggtaaggactggtaaattgaaaaaagttaggcggctttttcctttggcaaagaactagtttgaggaatagtagacaaaagttaatttcataatctaataatgaaatgagagatgaagggctgaacttccacctaaggaagatgtttcttatgcatctgatttctggacattaaacacactcagttgagtagatacaaatgcgtaaggtatgcacataactattgattgctgtggagattaaagagataccaacaactgcttgcccaaatactccttcagtacaatagataactactccaaaaacataatccaaggaagaatatgatataacagtagagccacaggagagatctcatccagcaagaca

SEQ ID NO: 58823 - DNA, 1385 bp, Homo Sapiens
gctttttttttttttttttttttttttgagaaagggtcttgctctgttacccaggctggagtgcagtgatcacagctcactgtaacctcaaactcctgggctccggtgatcttcctgcctcagcctcctcagtagctggcaccaggggcacatgctgctgtgcctggctgatttttttttcttgtttttgtagagaccagttctctctaagcacaaagacttatttgtgctttcaacatcaaaacttataacaggcctgtaatcccaacactttgggaggctgaggcaggtgggtcacgtggggtcaggagttcgagatcagcctgggcaacatggtgaaacccctatctccactaaacatacaaaaattagccaggcatcatggcccgcgcctgtggtcccagctactagggaggctgaggcaggtgggtcacgtggggtcaggagttcgagatcagcctgggcaacatggcgaaacccccatctctaccaaaaatacaaaaatcagccaggcatcatggcccacgcctgtggtcccagctactagggaggctgaggtggaaggatcgcttaagtcctggggtcaaggttgcagtgagttattatcgcaccactgtactccagcctgggcaacagtgagaccctgcctcaaaaaaaaaaggaaaatgaaacaaaaacttacttgcctactcccacctaattaggtaggaacatcacctatatcccaatatttaactttgttacataatgtttgagctgaggaggaagttctgagatcataaagaacaattcctttatttttcagagaatctgtgtgcctagagaggttatatattttgttctcaccatttagcagtttgaaaaatctgtatcacttttatatcacagaacattcctcaacaatgaatcgtcatggtcccatttaaaaagccttgatgcaggcactaccatccgtgcttcatacatcccaaacctcttcacgtagatagttatcccagcctttgcctctaatgcactgatttctaattctaaatgcagagatggtgaatttgcagcaactaggcaaggagcttttggggctacctgggcctgcaattgtctaagaaataagttttaagaattcagaggctgaaaacagcaatcctacttgggatgtcgtcatgcttacttcagcctgaatcacacagaagaaagccttcaagcatggacctgaagcaatgctgtaaacacaaacatcaaaaggaagaggaggccaggtgtggtggctcacgcatgtaatcccagcactttgggaagcggaggcaggtggatcacctgaggtcaggaattcaagatcagcctggccaacatggtgaaaccctgtctctgctaaaaaaaaaaaaaaa

SEQ ID NO: 58824 - DNA, 503 bp, Homo Sapiens
caaaaatttaacatgaatttttttattttaattttaatttaataagcaatacaggttttttcttacatattatagaaatatatatgcatgtactttctaagaaacagcacagacctgcagtaaaaattagtgataagtaagaaacaataactaaaatacagtaagaatagagtacagaggaacatggacagggttaaactgcataattcagacaagagagattctgattttattgcaaccttcccaccaaactttctgtccaaaaacaataaataaagctcagcagatagaagcacttatgatcaaggtcaatgttgaaaaataagtagcacctttggtcattaaaatgattgtcgacatttccaggaagcttaaatacagcatttctgattttgaaaagaaaataaaactaattaatatgtaccataaagtttagctgttgcatatgtcaatatttgcatagaatgtttgacaaaataaaaaggattcaaaacagagtttca

SEQ ID NO: 58825 - DNA, 493 bp, Homo Sapiens
  misc_feature (311)..(311): n is a, c, g, or t
  misc_feature (348)..(348): n is a, c, g, or t
  misc_feature (368)..(368): n is a, c, g, or t
  misc_feature (446)..(446): n is a, c, g, or t
  misc_feature (493)..(493): n is a, c, g, or t
ttcttggactcccctggcaagcaggtatacttcaagagcacgggagcttttctttcaagagtccacatttccaggaaggctggtgagagcaaacgagggactttcagtaacctggcaaggcagaataaagtgaacaagctggaacgaatccccctgtgccctggcttcatcgggactacctgcaggctgatcagggtggccagccacaaacacctcgaggccttccattcacttcacactgcagcactactcagccctgtaaacacacggttagtgcatatgctgagcttgagatcactaagagggcagcnctggtaacttctttgggactcacattccagaggaagnatcttgttttccctcagctngtgggaaattccttttttggaaagcttaagagcaaggctgcccttttggcacacaaggacatgctggaccgttatacntgctggtagatgcctgtcttccggttcctcattggcaggactaattn

SEQ ID NO: 58826 - DNA, 532 bp, Homo Sapiens
tttttttttttttttttaattacagaatctgtaagaggggaaaaaaaaagatgattctcttcagagccaaagagtctccaggaatgcattattttaaaatgcatgatggatatgatggactacataatttcctagtttgcttccacatcaataaaacaattttctaaaaagactattggtttattttacacatacactatcaagcgaaatacggtatcttgttcacttgtctggctcattgctgactgttttccttaaaagctgggaaggctgtgggtcaattcagctcgccacctgtttctgtactgcccacaagctgagaatgaattttgtacttttaaatggttggggggaggggagaatattttctgacacaagatatatgacattcacacttgagtgtcaaagtttttaggaacacagccacgcccatttgtttacactttactccttccactttacaatgaagaggtatgaggagctgctacagaaaccttctggcttgcaaagtttaaaatattttttacctggc

SEQ ID NO: 58827 - DNA, 541 bp, Homo Sapiens
  misc_feature (2)..(2): n is a, c, g, or t
  misc_feature (9)..(9): n is a, c, g, or t
  misc_feature (16)..(16): n is a, c, g, or t
  misc_feature (56)..(56): n is a, c, g, or t
  misc_feature (107)..(107): n is a, c, g, or t
  misc_feature (231)..(231): n is a, c, g, or t
  misc_feature (264)..(264): n is a, c, g, or t
  misc_feature (333)..(333): n is a, c, g, or t
  misc_feature (351)..(351): n is a, c, g, or t
  misc_feature (366)..(366): n is a, c, g, or t
  misc_feature (372)..(372): n is a, c, g, or t
  misc_feature (385)..(385): n is a, c, g, or t
  misc_feature (405)..(405): n is a, c, g, or t
  misc_feature (413)..(415): n is a, c, g, or t
  misc_feature (419)..(419): n is a, c, g, or t
  misc_feature (422)..(422): n is a, c, g, or t
  misc_feature (429)..(429): n is a, c, g, or t
  misc_feature (432)..(432): n is a, c, g, or t
  misc_feature (440)..(440): n is a, c, g, or t
  misc_feature (446)..(447): n is a, c, g, or t
  misc_feature (463)..(464): n is a, c, g, or t
  misc_feature (476)..(476): n is a, c, g, or t
  misc_feature (482)..(482): n is a, c, g, or t
  misc_feature (494)..(494): n is a, c, g, or t
  misc_feature (496)..(496): n is a, c, g, or t
  misc_feature (499)..(499): n is a, c, g, or t
  misc_feature (504)..(504): n is a, c, g, or t
  misc_feature (506)..(506): n is a, c, g, or t
  misc_feature (511)..(511): n is a, c, g, or t
  misc_feature (515)..(515): n is a, c, g, or t
  misc_feature (517)..(517): n is a, c, g, or t
  misc_feature (519)..(520): n is a, c, g, or t
  misc_feature (522)..(522): n is a, c, g, or t
  misc_feature (526)..(526): n is a, c, g, or t
  misc_feature (532)..(532): n is a, c, g, or t
  misc_feature (534)..(534): n is a, c, g, or t
  misc_feature (536)..(536): n is a, c, g, or t
  misc_feature (540)..(540): n is a, c, g, or t
tnttttttnttttttnggacttgaattatatgtattttaaaaagactgtttctagntgtttggaatgaatccagaacccataaattatatcccagaatactgaaagnctctgatgaaataacacgaccttcgacagtaaatctgagtcaagatgatttggttgaggtagatacagacagatagaagcttcacaagcacaagaatactgttccctggcctatccacagcttngagcatactgcctggcatgtattaatggcttgntaagtgtccctgacaaaattccaaaatctatttttttgaagttttgtggacaggtagaaaagaaagcantggtcactaggaggcagnatcgattttatgaangactangcaacgtctcatnggttttcccacttatacagngggaatgnnngggncancatcaanggnatcttgancccaanntctcaacaatcaattnnttccctattaancaggantcggaggcatangntcnttgcntntctcncaantnanntnattngggcgntngntctnc

SEQ ID NO: 58828 - DNA, 682 bp, Homo Sapiens
tttttttttttttttctctataggacttggacaggggtgttataattcattatgctatctatggcctgtttttaactgactgcccatagctccactagtttctataaacctagctagaaactataaaaaaatgctttggtttaaagaatgattcaaggattctggcaaaatggaaaggtacttctgataaaattgcaccaaaactacaaattaagaatctttttaactttagtggctaactttacaattacatgtacagaatcactccttttctagcagtcttgaggggtggggagactggagggagatatcactctcttttttaggtggagggtaaaagagagagcaccactgaaagccaaggttttaaatacaaaccacatactggtagatcaagagctttgagtgagatgtataagaaagtaagaactctcagaggctttcaagagtctgttgaataggataaaaaacctaaccaaaatgaattccagaaagcagaaatcctagtactgggagaatgatgtgaatttatcttttttaaagggagaatatagtagaagaataaggtgaagataggaaaacagggtattttatttaacctggtatccaagcagtccagattcccgttcatctggtagctcctctgtgaatcgtctcttctgtgcctgcctcgtgccgaatt

SEQ ID NO: 58829 - DNA, 474 bp, Homo Sapiens
tgtccggaatgtggtaaatgtgatttggaaaaccaaagagacatgatggtggagaataaggagagttgtcagaaaggtttccctgcagataaacttttaaagatctcaacctgtggacgggaaatgtggggttggagcccccacacagagtccccactggcacagtggctcatgcctgtaatcccagcacttctagaggctgaggcgggtgtattgcttgagcccagaagtttgagagcagcctgggcaacgtggtgaaaccctgtctctacaaaaaatttaaaaaattagccaggcatgagggtacacacctgtagtcccagctactcagggggctgaggcgggaggattgcttgagcctgggaagtggaggctgcagtgagcctaggtggtgccactgcactccaacctgggggacagaggaggccctgtcccgagtgcggcaaaaaaaaaaaaaaaaaaaaaaaaaaaaaa

SEQ ID NO: 58830 - DNA, 1940 bp, Homo Sapiens
cctactggtagatcttcacagactggatgttaagcaagtggaaaggcagaacagcctccactcgcggtgcacggggaagagtgggcggcggacgtggttttgggcctgggacccaggtgttcctctaggcccagggcgggcatcgctgcccatccgtcccacaggtggttctgaggcgtctctcaacagccatatggcggacaccagaacccgggtgtaacagtgacccgtttctgtgtgggtccccactcccagggagggcaggagagcgccgggggcgtaacccccctcccccacgctggcaccagagtgtgagcagaatcggcttaaggcagctcccagtccccatcgcccccaaggtcgaaagaatcgggacaggaaatgggtcgggggaccgagtttgggccggaatgttcagagcgtgtccgtcctgctctttaaagcccctctctccatcccagaaccaaagccgggcgcccccagcgctcgctgcggtctcgcgcccgggtaacggccgatggccgcccccgccccagccgcagccggggaggaaatcccgcgcctcggaagaggcgcttcgggctcgggcgggttccggaagccgaggggccgggagtaggtgggcgcataggggctcctgggaggcgggaccaagacgcgcgttaccgggaggccaggcccggcgctgcaccctccgcggcccggggcctgaggccgggctcccgcgacttcccggcccaaagcagcgcagcgcccgggcggcccagccccgcagcggccacagcagcatagccgggcgagcggatccagaggcccgggcttccttcctgtgcgagtcggcgcggacgactgctagtccagccgttgggcgccgcctggatctcggcgcctggcccttaaagagacccggtcgcatttcatctcagcgagaggagaaatactcgaagggagaggttcgccgctggcagccagaagccttaccactgctaggacgctggcagaacgcacccataacttggcaacactcggaggatggatggcaaataataccagcgactgaagggttaattaatgattgcagattaattgaacaccttccgtaatcagacacctggcacacactcatgatgtcacttattcctcccaacaaccctgcaaatagataactgtctctcccattctccgagcttgtcctcagagaattaggtaacttgttcaaaatggtcagaagcaacagatataactccttgctctactctttccccccttctcactactgcacttgactagtctttttaaaacataatttttttggccaggcacggtggctcacgcctgtaatcccagcactttgggaggccaaggaaggcagatcacctgaggccagaagttcgagaccagccttggccaacatggcgaaaccccatcgctactaaaaatgcaaaaattagctgggtgtggtggggggcacccgtattcccagctactcagaggctgaggcaggaaaatcgcttgaacctggaggcagagattgcagtgagccgagatcattgcattgcactccagcttgagcaacagagggacacttcgttccccccgccaaaaaaaaaattttttttttaatgatcagaagcggctgggcgcggtggctcgggcctgtaatcccagcactttcggaggccgaggaaggtagatcacttgaggtcatgagttcaagaccagcctgaccaacatggccaaaaactgtctctactaaaaatacaaaaattagccgggcgtggtagcgcacgcctgtaatcccagctactcaggaggctcaggcacgagaatcgcttgagtctgggaggcggaggttgcagtgagctgagatcgtggccactgcaatccagcctgggcgatagagtgagactacgtctcaaaaaaaaaaaaaaaaaaaaaaa

SEQ ID NO: 58831 - DNA, 485 bp, Homo Sapiens
tttgtcctttgcataatgcatggcaaaatgagcctaaaacctatatggccattttaattttgcttttgtaataataccaagcccagtttctttcaacttgagagatgagctatttattcttttacttaatgaagatgtaagaaatgatcttctgttctaaaaaaaaaaaatttctctaatgtctcttgaccctgtagaaacacattcagtttctacactgcaaaacagagggatatctgtatggcttccctctttccatctttcctttcctcagggaaagccaggaaaaagaaatcttttctatcacagcagacacaccaaatctccctaagttgtaccaccttaattcctcagaatgcaattgtgtatgataccaagctacaacttgataagaaattgtgattttcttcttttattttcattctccaattttaaaaacatctattgcacatctaccatgtaggaggaatgtgctcacactggag

SEQ ID NO: 58832 - DNA, 561 bp, Homo Sapiens
tgaacaaaatgaggcctaggttaagtattttatttggcttctcaagatggactgagaagttgggcaccagctccagaccaattcctggacacacatcaaacacagccctgtcatttatccagtcagtcaaaacaatcttttccatctaaccctttaatgtttatgtccttaaaagctgctaattgaatccagttcttgagatctatttgctaaaatctataccatctaatttgtaaatgatgaacaaaaatgaaaaaaacaatatgttaactttcctggcaaaacagaagagactccactgtaaccaaagaaggaaggacaatgtttttaatatttgtcaaattttaagagaaaactattcagagacaaatagttgtaagaaacttagagtaactcaaactgtttttactattaagaggacacagggtatttaaaattcctcagaaaaacctgaaacaaaatcactctataaatgtagctcaatattccctcttcccctaaaagataagcataatctttcctcttaacaaactttacatacagatttttataatgtatctt

SEQ ID NO: 58833 - DNA, 653 bp, Homo Sapiens
tttttttttttttttttagttctaattatgtttaatattggtttgctgctttattgaataatctacatttgcttttaaaaaaaggaaattcacttaactgcatgtcagtcacccaagttttaagtgtacaaatgaaatggaaaacatttattacacaaatttaattacaattctaagaaataaacatgcaaattagatagagttcaatttgcagatgctaatcctcatccttgatcttgttccttcctcccttgattttcagtctgtgcgtcttcttgattcctagggagccaggcagccagaggtctggtttttcacagtcggaggatcactcctcggcgggctgaggctgctgcccgcctggtccacgcctccgcctctctcttcccttcctcccctcccgcctcttcggccctagcaactttccgagtgcccagctgtggtcgcagaagcagggaataggcgtcctcgccgccaggtcccacgggcgcagggcgctcccgcaaccgcgggcttccagcgggtttggccggcaagggagggagggaaggccgggccgacatctgctgcgggctggagcgcgggggcccgggccagccccgccagagccctgccagccgctgtgagtcatttccttggaatcctacctttgg

SEQ ID NO: 58834 - DNA, 526 bp, Homo Sapiens
aatatttttcgtcgttttgatagataacgcatacaaagagtagtaaaacgcaaacagcacaaaagggaaaggaagtttccttccaagggcggttcccctcccctagggcagtttcctgtgttcctttgcagagatactcagtatgtttacaagcgtgtgtgtttattcgtctcaggtagagaccagagaaatatagaaggggtcctcccaactgctccaggctgtgatcaagggtgaaattcgtgcgaagggatctgggtaggaaggggtccctgggcttcgaccgtcaccttaaagctccccgggaccggtcctttcagccggctctgggctccctcccctcctctcggggatttccgtctgtgatagggcacctccccgcttaaggcttttcgaggatcccttcaaggccaccggttagcgctgaaagagaagcgtctgtgacatcaccacccccgaccaagtttagggtacccggcagcccaccggggtccctaagcgctagatacggctttaacgccctccc

SEQ ID NO: 58835 - DNA, 2378 bp, Homo Sapiens
tctaaaagctgcggaattcctcgagcactgttggcctttggtagatgcccctctgggagagatccccaggggtgacagccatgggccctggaagggcctgggctagggacagggaccagagccagtccagggagaggacagagccaatggactggggtgtactgtaacagccctgctggcgagagggaccagggcaccgtcctccagggagcccatgctgcaagtcgggccagaggtgcccctgaacctgaaggccaatgagacccaagacaggccaagtgggttgtgagacccctgaggagctgggccctggtcccaggcagcgctggcccctgctgctgctgggtctggccatggtcgcccatggcctgctgcgcccaatggttgcaccgcaaagcggggacccagaccctggagcctcagttggaagcagccgatccagcctgcggagcctgtggggcaggtaaggggcaagagatatgtgggggtcctgcagcagagctgggaaagggtgaccaaggggggacaagccagaggagtgaggaggaaggttaacccctaagaggggcctgggctgacactggctttagtaatgggttgatattttgtccatcacagatttgtttgatttactgtttttaatatcatattacgatattatttttcttcatttctgagttttctggcgccacttaaattttcaccagggtcagtgcctcaatcacctagtcctagtcctctgggtagggaaggaacagaggcagggacaggacatccacagggggtggtggccactgtccccacagggtgcccaggcctgttcctccccctcctcctctctgcccatgtgcctcctgcccagtgagggcaggggccactccctggagaaggcagcaagggcttggtttggtctcccccaaggctgtctgttcaccaacttgcacataaatacttactggggccaggctcaaggacacagggagggtgggatgaaccgaggggagctgtccagtcattggaacaggcccacggcccatgtttgcagcaatgaagggagagggcatctccctctgggatgatgcccaggctggtctcacagatcgaggggcactggctggtgatgggtgcccccaaaagacagagcagtgtcagaggagaggagagcacaggatgaggctgggagctcctgggtgactgggaaggggaggcaagaagaccatagggtccgtgcaccattcccagtccaggacgagtccttggatggatttaggtagattgattatcagagtcagatttgtgtttttggaaaaatcagcaccggattggaggctgatgcgacgcccaattagaggagggaggagagggggtgatggccaagtccagggtaggtggggatcctggaggaagccgtgccttggggatggggaggacactcagattcagagcacccaggggcccagtttcctatgaaatgggagcatgaggttgaagtgagggctgagcagaggggagcagacacgctcggggactgtctatgggcattgaaaatgtataaccattttagcaacaggcggcgagtcaaaacccaaggtgtgtttatctaaactgggcaattcctcttctaggaatttatcctaagggttggttgggggaataatcaaagctgaaaccaaatctttataacaagggtggttaggtcagcattcttagtgatgggagaaaactggaaaaaatccaaatatctaccagaaagggtgtgaaaaaacacaattgtatttgggggactgttgttgattttgttttgaaacagtcttgatctgttgctcaggctggagtacagtggcgtggccacagctcactgcagcctcaacctccagggctcaaaagatcctccagcctcagcctcctgagtagttaggactacagatgcaggccactacacctggctaattttgattaggattatcattagtttagagacagagcctcgctatattgctcaggcctgtctcaaattcctaagctcaagcaatctttctgcctcagtttcccacgtgctggaattacaggcgtgagccactgcacctgacccaactgtgtttttaaagtatatatgcattttcaaaaacctgtcagaaaatatagaaaaatgtcaatggtgtgtctggctggctgatgggatttcacctaattttaatgtggctttataattttctggttttgtgaagttgttcacaaaaagagacatttcttctaatataatttttaatacaacagtaatgtactcatgtgcattactctttttgtaatgagtatattacaaaatgtaatgacttttgtacattactcttttttcttgccaaaaaaaaaaaaaaaaa

SEQ ID NO: 58836 - DNA, 1737 bp, Homo Sapiens
gtggtcaccttccccagctagaaagccttctttttatatcaacttccttttaattatgaagtattacaatcaagcataaagacataataaatgttaacatctttcctttgtgtctgtttaaaaaatgtttcttattacagaaaatttcaaatagatttaaagtagagaaatgcacgtgatgaaaccccatgcacttgccattccatttcaatagttattacttcacggaagagttggcaatgatgagaacatgtcaaacacctggaaattcctgtctcattcaacagactcactaaataaaatcagcaaggtcaatgagtcaacagaatcacttactgatgagggtacagacatgaatgaaggacaactactgggagactttgagattgagtccaaacagctggaagcagagtcttggagtcggataatagacagcaagtttctaaaacagcaaaagaaagatgtggtcaaacggcaagaagtaatatatgagttgatgcagacagagtttcatcatgtccgcactctcaagatcatgagtggtgtgtacagccaggggatgatggcagatctgctttttgagcagcagatggtagaaaagctgttcccctgtttggatgagctgatcagtatccatagccaattcttccagaggattctggagcggaagaaggagtctctggtggataaaagtgaaaagaactttctcatcaagaggataggggatgtgcttgtaaatcagttttcaggtgagaatgcagaacgtttaaagaagacatatggcaagttttgtgggcaacataaccagtctgtaaactacttcaaagacctttatgccaaggataagcgttttcaagcctttgtaaagaagaagatgagcagttcagttgttagaaggcttggaattccagagtgcatattgcttgtaactcagcggattaccaagtacccagttttattccaaagaatattgcagtgtaccaaagacaatgaagtggagcaggaagatctagcacagtccttgagcctggtgaaggatgtgattggagctgtagacagcaaagtggcaagttatgaaaagaaagtgcgtctcaatgagatttatacaaagacagatagcaagtcaatcatgaggatgaagagtggtcagatgtttgccaaggaagatttgaaacggaagaagcttgtacgtgatgggagtgtgtttctgaagaatgcagcaggaaggttgaaagaggttcaagcagttcttctcactgacattttagttttccttcaagaaaaagaccagaagtacatctttgcatcattggaccagaagtcaacagtgatctctttaaagaagctgattgtgagagaagtggcacatgaggagaaaggtttattcctgatcagcatggggatgacagatccagagatggtagaagtccatgccagctccaaagaggaacgaaacagctggattcagatcattcaggacacaatcaacaccctttccgggaatggatggaggtgctttaactgatgcgagtctcacagagtcctatttcagcaccagctttattggagtcaatggatttggaagccctgtagaaacaaagtatcccttgatgcagtacactctggttgtcttccaacgtcttcgggtctgcacctctggattcagcaataccaaaaacaccggcccccaaacttcccacctacttgaaccaataaacttcctcttgtgtttaaact

SEQ ID NO: 58837 - DNA, 617 bp, Homo Sapiens
tgactcacttacttaatgtgtttattcaaagtaagagtctttatagatcttttcactaattaaatacagttgggtgtctgctgaatttcccttgaaaacattttgaagtgaaaaaagtcagtactgagtactgtacatttgtgttgattaacatttggacacaaatatacttttaacaccaatagagctgaaagactatgcctttatcttggatttcatagatttccccttccccccagtgacttatcttacaaggcaaacaccagcaggcaaaggggatctgtagaaatgtgcaccctggtttcctcctccatctcttctaccaatgtgggaagaaagccaatgcttcccagcactttctgaaggtggaatctcctcctctttacttaatgttggagaaaagtggccaccagtactcgatcattgtagattcggaatctcgccatctaaaccagacttcaaaagtgcactttcgggtctacttagttaagaaagagaataatggaagatgataagtggttagcaaagccagatgccttatcaccagggtcctgttctgctgatctgtgccaagcaactcatctcaccaaacctaatgtcaaccctcttgatccaca

SEQ ID NO: 58838 - DNA, 562 bp, Homo Sapiens
aatattcatatcagctttatttaaaacagcctcacactggaagcaacttatatatcagtggtgaatgtgtaaacaaatagtgatacatccacacaatggaatattactgagcaataaaatagatgaactattgatgtacacaacatggaaaaatctcatgataattttgttgaatgaaagcaggcaggtattgtatgattctatttatacaaacagggataatgtatatttaataaaacttaaacagttgtgaggatcaaataaaattagattatgtatgcatgagaaccaactaatatatgaaaatgttattatttatagtattttcattgaagtaatacaatttttcagtcatctaacaatgtattcctggaaccagatcatgactctccttatggttaatctttattgagtgtttattatgtattggcttttggctatttatttaaatctcaacaaaaatccaatgggataagtactattagtatcattttacagatgaaattgagacctaaaacagagcagcaatttgggttaacagaaatagagctccactgagaat

SEQ ID NO: 58839 - DNA, 499 bp, Homo Sapiens
ttttttttttttgagtttctaccattaacattttatttaaaggctttgggactctgaagtataatgtttgtgaaatgctatgagccagaccctccacactgaaaattcccagtgtaaattaatttgttaaatgctcttagaattcctgcaataaagaacacctatctaaccttagttatccctgtgtttcccaaatatatcttactttggagcactttttttttagtaccgatttacatcctgggaaatggtgtttaccatgctttaaaaaaaactgtggtaaaataaagataagatttaccatcttaaccattttagagtgtacagttgagttggcatacagcattcacataacttaactgtgcaaccaatccacaggactttttatcttgcaaaactgaaacactatacccattaaacaactcctcatttcctcctcccccagtccttggcaactaccattctacttgtttctatgcatttgactgctctagatact

SEQ ID NO: 58840 - DNA, 2011 bp, Homo Sapiens
gcaagagcaaaagagctgaaaggaagactcagaggagagagataagtaaggaaagtagtgatggctctcatcccagacttggccatggaaacctggcttctcctggctgtcagcctggtgctcctctatctatatggaacccattcacatggactttttaagaagcttggaattccagggcccacacctctgccttttttgggaaatattttgtcctaccataagggcttttgtatgtttgacatggaatgtcataaaaagtatggaaaagtgtggggcttttatgatggtcaacagcctgtgctggctatcacagatcctgacatgatcaaactagtgctagtgaaagaatgttattctgtcttcacaaaccgcgagccttttggtccagtgggatttatgaaaagtgccatctctatagctgaggatgaagaatggaagagattacgatcattgctgtctccaaccttcaccagtggaaaactcaaggagatggtccctatcattgcccagtatggagatgtgttggtgagaaatctgaggcgggaacgagagacaggcaagcctgtcaccttgaaagacgtctttggggcctacagcatggatgtgatcactagctcatcatttggagtgaacgtcgactctctcaacaatccacaggacccccttgtggaaaacaccaagaagcttttaagatttgattttttggatccattctttctctcaataacagtctttccattcctcatcccaattcttgaagtattaaatatctgtgtgtttccaagagaagttacaaattttttaagaaaagctgtaaaaaggatgaaagaaagtcgcctcgaagatacacaaaagcaccgagtggatttccttcagctgatgattgactctcataagaattcaaaagaaactgagtcccacaaagctctgtccgatctggagctcgtggcccaatcaattatctttatttttgctggctatgaaaccacgagcagtgttctctccttcattatgtatgaactggccactcaccctgatgtccagcagaaactgcaggaggaaattgatgcagttttacccaataaggcaccacccacctatgatactgtgctacagatggagtatcttgacatggtggtgaatgaaacgctcagattattcccaattgctatgagacttgagagggtctgcaaaaaagatgttgagatcaatgggatgttcattcccaaagggtgggtggtgatgattccaagctatgctcttcaccgtgacccaaagtactggacagagcctgagaagttcctccctgaaagattcagcaagaagaacaaggacaacatagatccttacatatacacaccctttggaagtggacccagaaactgcattggcatgaggtttgctctcatgaacatgaaacttgctctaatcagagtccttcagaacttctccttcaaaccttgtaaagaaacacagatccccctgaaattaagcttaggaggacttcttcaaccagaaaaacccgttgttctaaaggttgagtcaagggatggcaccgtaagtggagcctgaattttcctaaaggacttctgctttgctcttcagaaatctggtgcctgagaacaccagagacctcaaattactttgtgaatatgactctgaaatgagatggcttcatccaatgaactgcatagtatccggagctctctcattgtctgtgtagagtgttatacttgggaatataaaggaggtgaccaaatcagtgtgaggaggtagatttggctcctctgcttctcacgggactatttccaccacccccagttagcaccattaactcctcctgagctctgataagagaatcaacatttctcaataatttcctccacaaattattaatgaaaataagaattattttgatggctctaacaatgacatttatatcacatgttttctctggagtattctataagttttatgttaaatcaataaagaccactttacaaaagta

SEQ ID NO: 58841 - DNA, 473 bp, Homo Sapiens
ttttttgaaaagtcatgtcatttattaataatttcttttttttttcttctataaattggaaggaaaaagtctttggtgacactctctataaaacaatctatcttggatggcgaaacccagacataaagttacacaggtcagtgaagtaaatcaatatctatggctttgtattttctcacacgcgctctctcacacatacttgagggcttaattacgctaagtcattaatactctataacaaatgggaaaaacacttcagaaaagacctgtggtgacactacaaaaacattggcaacatattagaaaactctgtcccaagtgtacatcgtatacaaaataaggtatacttttgttttttgcgttacaatttgccacctaaaatagttccagtttttgatgtctttctttctgcccctcaacatatcctatacatattgttctctcaaaataagtacacaaggttcattacatgg

SEQ ID NO: 58842 - DNA, 562 bp, Homo Sapiens
tgatatttacagtatactttattcaaagcatttcagttaaaattattttgggttcaaatacatgaacatataattatatataaaatactatagttctcaatagtttacagtgacatcttttttagaattagctgcttataatttgagtgtaaatgtattacagaaagctgctaaattgtttatatttctacttatttcaatttagctattagatatttagaacactcataagcccacctacagtatagttattatactttaaatatttatattcaataggggaatcaatacaatacaaaagatatttgaacagctagtcctttgtaacacccccccgctgctgccgagagggctagataagggggtcttacctatttcctctgtaccacactcacattttaccagagtccatatacagggccagtgtggagtcacttcatgcaaatgagatggtactttcagtttccccaaaaagatgactgcgaaatccagattacaccccaacgttatgcctcaccttggagacctattctaatgaatgtcaattagtgaatgttgacta

SEQ ID NO: 58843 - DNA, 479 bp, Homo Sapiens
aatgctttattaaagtttaattttgaactcccaattagcgaaagtgcattacaaatcgattgcaatttcctagaaggtgcagcaagttctctgcctgcctgccacgtgcgagacgctccacagcgagcttccccagctccgggcagcagaaaggggatggttcagagccgatctccgcatcccaggaagtccctaaaatccgcgccagcccctcctcccgcagggcgggggcgtccacggcgcgaacccgccagaggtgtagggggaagtgtggggggctggtccgcagccttcgaggggtggggcgacaggagcgagcggccgggggaggagaaaaaggcgggcggcgggagagggggcctctattatctcggcttctcgggaggagcctcatctagtcagtcacgcagaagtttctctttcgctcttcgcgctacacacccagattggcttccagcgcgcaggcgagtggggcgaag

SEQ ID NO: 58844 - DNA, 584 bp, Homo Sapiens
  misc_feature (526)..(526): n is a, c, g, or t
  misc_feature (536)..(536): n is a, c, g, or t
  misc_feature (557)..(557): n is a, c, g, or t
  misc_feature (561)..(561): n is a, c, g, or t
  misc_feature (567)..(567): n is a, c, g, or t
caggaaacagatttatttactcatgttcatgggaggaaaatctacataaaaacattcatgaaagcataccggctatgtcatacttggattattatagtaaatcccatttattagaactcattgtgaaacaatgggaaaccatgaaatgtaatttgaatacaaatattggtccctgtggggtctcagcagtcataaaaatataggaaaacagagctttatttaagaagattggagctgctaatgtggaaaattgtgtttggaagctggacttaaccttttatttaaagccctgaagattctagtgtaaactctttgatgacagcttcagcatttaatttaagcctaatgatgaccagcaaggaaagtgacatcattaaccacattttctgtttgggataaggtttagaactacactgttgacttttccccccaaacacaggcactggttgggttctctcgtgtatatacaaataggaataataagaattttgaaagttgcatctttggttctgcattagggattccntttataatgnaattggatttcatataatggnaatntgaatnttaaatcaggttaaagg

SEQ ID NO: 58845 - DNA, 1283 bp, Homo Sapiens
ggccgcctcgcacccggaacaacaaagcaaggaagacggagcgagcctcgggggctcctagcaacgggccggggcgggagttccatggagactggggagcgcgcccgtctcatcctcatccttgtcctccagcttctccttcgcatccgacgcaaccggcagcagcgctgccgccgcgtcctcagccaccgctccctcttcccacggatgtgatcttcgtggtggaaagctaaattttaaaaccaccccaatggatgcagacagtgatgttgcattggacattctaattacaaatgtagtctgtgtttttagaacaagatgtcatttaaacttaaggaagattgctttggaaggagcaaatgtaatttataaacgtgatgttggaaaagtattaatgaagcttagaaaacctagaattacagctacaatttggtcctcaggaaaaattatttgcactggagcaacaagtgaagaagaagctaaatttggtgccagacgcttagcccgtagtctgcagaaactaggttttcaggtaatatttacagattttaaggttgttaacgttctggcagtgtgtaacatgccatttgaaatccgtttgccagaattcacaaagaacaatagacctcatgccagttacgaacctgaacttcatcctgctgtgtgctatcggataaaatctctaagagctacattacagattttttcaacaggaagtatcacagtaacagggcccaatgtaaaggctgttgctactgctgtggaacagatttacccatttgtgtttgaaagcaggaaagaaattttataattcaccacttaattggttagaatctctaactgagcaccttttaaacctgctgcacaataattgaggaaatagactcttttattcattcacggctacagtgtaagctccagtccctttggattttattccaaaccttgctgtaatataaaaggaagtttacaagacatgatattgctgcttttacaaaaggacattctatttattttcgcagtaattctcatgtccccataagcagagctgtcacagtgtgcactaccttagattgttttattgtcgtcattgttatttttttccattttgagctaatgtgttttatttgtgaatagtcttttacatttttgtatgctgaatatgggcaccaaagaacctgtaaaagttatctttttcaattgaatgtgcacaaataaaagtttggattggactcaaaaggaaaactggaccaacaaaagataaaaaaaaaaaaaaaaaaaaa

SEQ ID NO: 58846 - DNA, 489 bp, Homo Sapiens
ttttctgtttcagacatttatttccatttaaatgacactttgaaagatcgaggagccaatctgtaccgcaaagacaacttatcatcaaagactctagaagtacaatcgtatcaattcacaagacttgatttcttcaacttaaatgatagcttttagttaaaatatacctgagagaagaactccaaaggatgcctgcctcataatctgccctggacttgtcattcccgacaggacacctcaatggacactgccccaccccattaagactctgaagcgtagggtcccattgctttgcttccgaaatccaaggggaacaagaagtacccatctcttacaaaaataagcatgtcaacattgttcagtacatttttctacacatataaaatcaaaataaattgtaaaaatatttttccaggtacaaaataaatatagaaaacatcaatgtaaaaacaaaaggattgtccgattcagaccattaccttgccaatt

SEQ ID NO: 58847 - DNA, 504 bp, Homo Sapiens
  misc_feature (342)..(342): n is a, c, g, or t
tttttttttttttttttcagtgatcaagatgtcagcatcggctgtttatttctggtcttggctggcagcaatgtggccaacttcggaccagccagccacaggtctggggctccaggatgcagctgtgctctggtgcactgtgggtcttcactcatacttgcagaaatccttaagttctttgggcaggtggagcccatcaatggccagccggtgcaccatgctcctttgtatcactaggcggcacagagtctgcagggatggcactgtgggaagaagaagccatactcgagctggacaaggcgcacgctctttgtggaagcaaacacgtccaccaccgcgtanaggggctgcgcagctggcagtccccgggcgctcgggcccatgtcctcgccgttgatgatgatgtgcatgtcggccgtgccatcggggcgcgggcaaaagaggacacccaggcggctacggcgcgcggtcggaggcagcacgttcagctcatagagctggtcc

SEQ ID NO: 58848 - DNA, 570 bp, Homo Sapiens
  misc_feature (489)..(489): n is a, c, g, or t
  misc_feature (512)..(512): n is a, c, g, or t
  misc_feature (531)..(531): n is a, c, g, or t
  misc_feature (564)..(565): n is a, c, g, or t
  misc_feature (568)..(569): n is a, c, g, or t
gtacacagagagagggaatttcagaatttttacatacattttagcaaacaagttttgatctattggcttcttggtgcagtaatgcaacggcaatccattctggtgccaaaggctcatactattacaaggaagttgtgaacactaatttcttaggaggtgaggccagccccacatgaacttctcttgcatccctctggtccaccatgacacataaatacttagacttttttttttcctctaatgaatcattagacattaaaaacggaataacagagtcacaaagggccacatgcttttcggtataaagcattctccttctctaggttgctatcacagtgcagacctgactgcctgaatatgctcaggagatttagtcaatattgtctgtatttggttatggaaaaggctctcctttttttttttttttttaaatccaaagtgcatagtgagaacaaaccaaagcatttttttttccttctcagcatcagnttcatctgagcattttccatganaggcctgttaaatgcctgnctttggcctttcaaccttcaaaattaaaaattnnatnna

SEQ ID NO: 58849 - DNA, 570 bp, Homo Sapiens
caattttagcagattaggttttattttaactgcatcgggaaaaccacatagataaaactatcttattgtttatcctttacaattttaaagcaaaacaaacacaacagcattttatttatttaattgtagtgcatccgtattttcacatattggattttaaaaaatctctgcttacaagaagaaacgaaagcccaaacaagaatgtagtatgtaagcgagtacaaaatgagatagagtagaaggcaaactgattacctaagtcccaagaagtcaggaaacaaagtgtaactcagatccaagcaggggtaaccaagaaaaggctgcaattctgggtgtacctgctgctttcttcagcactgcactgtacaacattctggggcagcctgagagatgcagactatacaaatatagtctcacatctcaccaccaaagcacaaacattccagaggcatggaagccaaagtgtaaacacttctgcagtcaactcttaactattcacatttacagaaggaaagagcaaaggcaccactaatccaagaatagataaatggaaagatcactgagttagct

SEQ ID NO: 58850 - DNA, 571 bp, Homo Sapiens
tagtgactcagttttttattgaataaaatggcctacagcctgatgacagtaatatggcccttgggttttgaggaaaatatcatgttgtaggttggccaacaaggagatagcagtccagctgaaatttgttttcttatactggctttaaggcagtgattagaaaaggcctaagaggtgggttctgtaagggattgctggaaggaaagtaggaatatggaaagtcatgagacatatactgtcatctcttcttgcttcctctcaagtcacatgcaaattcagggagagttagtatgaaacacacaatggaaatttgggctctaacatatgcaatctgattcttcatggacttcatttggccatatcagttccaacaatttcagccaatgtttaaaaatcttataagcagataaaattttagtgtttcaacaagccatttcctatctttcattctgaaaatccattttaagtcatttttttaacagcataggggtacaaattcagcttctgtccaatgaaatacagaaaaggatatcacttttgtattagttcaggctgctatgccaaagaacca

SEQ ID NO: 58851 - DNA, 584 bp, Homo Sapiens
  misc_feature (52)..(52): n is a, c, g, or t
  misc_feature (334)..(334): n is a, c, g, or t
  misc_feature (344)..(344): n is a, c, g, or t
  misc_feature (498)..(498): n is a, c, g, or t
  misc_feature (511)..(511): n is a, c, g, or t
  misc_feature (542)..(542): n is a, c, g, or t
  misc_feature (547)..(547): n is a, c, g, or t
  misc_feature (553)..(553): n is a, c, g, or t
  misc_feature (565)..(565): n is a, c, g, or t
  misc_feature (573)..(573): n is a, c, g, or t
gcaagaaaaaaagttctatttattctctgttctaatgggtataaacattttnttatctaacttgaacatcataccaactcaaaggcaggtcttactagcaatgactggggctcagagaggtttggcgacttcacgaaggtcacacagctgtcagggggaaaagtcagaacttggatccaggtcttcagactctcaggtctggtgtcatcctagggggcttggtgatggccatatctttaatgtatttgtggagagtgaaaggctgtcagtgagtaagcttaagagaacaggagacttgtgtgggaaacagtcggtatccattgattagactgantcatgtaganttgctaatttcaccattttgaactatcgaaatcactatttgggtatgactcaacctcatcctttaagtacacattcatgacagtgagtggttagacagtgattcctagattagtttgggatggggcagtgcttccacaggacaaggccattccngggtagagacggngggagcaggctgtccttcagctaggggcccnggggncttccnggctgctgttgnccttagcngggccttggag

SEQ ID NO: 58852 - DNA, 578 bp, Homo Sapiens
  misc_feature (534)..(534): n is a, c, g, or t
  misc_feature (550)..(550): n is a, c, g, or t
ggtttgttttagctttaaagagacaaaagagttgcatgcagcatggaggaaagaggtagtaatctaatagaaaggaagcattagagcagggtttcccagcctcaacactgttgtcatttggggctggatcactcttggttatgggaggctgccctgtgcactgtgagatgtttagcagcatctctgtcattcacccactagatgccagtagcaccctttcctcccagttgtgacaaaaatatctgcagccatcaccaaatgtcttctagggggtaaaactgtccctggttgagaaccaccagattaaagtaagggaggaccatggagagagcaagttctgcagaacagaatgggacccaaagagcaaactatgtctgtataaagtggcaataattttgctaatgatcaaacacaaaattaattacctttatgtctggatctaacagctggttcttcaacaactcaaagtcatttgtttcaccctttttgtacttcagcaagacttctgtcacagttccaccaaaccgaacagtntttcttgggggagaanttgaaaaatcattctctaatgcacgcat

SEQ ID NO: 58853 - DNA, 542 bp, Homo Sapiens
tttttttttgatgcaagccaataatgggaatctagaaaactgccactaaggagttaagtaaaacagggaataatttactttatcaatgatccaaaccagcccctgaatcatcagatgatatagaccaagttgattcttagatttctatcgattcagttaacaacatacacatattacgttgctccataacaaagtatgacacaaaaacagtaaggaattagctcaactaatacttaactacagaaggcttccaaaacgtacaaaataacacaaacaagtgtgaatgtcagcataatagatactgttgaaagacttatttgagtatctcttcctgtggctagaaaacacatctggaaaaacacacaattacaatacaaacacaatccaataaaagtccaacccctctctactgtgcagggaaaggaggggctcaaggccatagaaggagctatgcttgaattaacaaaactaccagatggccaagaggggactagatcaagggtagagggcgaatagcattgttgttcagcgtgtagactctg

SEQ ID NO: 58854 - DNA, 550 bp, Homo Sapiens
  misc_feature (503)..(503): n is a, c, g, or t
  misc_feature (506)..(506): n is a, c, g, or t
  misc_feature (509)..(509): n is a, c, g, or t
  misc_feature (526)..(526): n is a, c, g, or t
  misc_feature (533)..(533): n is a, c, g, or t
  misc_feature (542)..(542): n is a, c, g, or t
acttttcaattttattgtataacttttcattaaagtgagaaagccattatattcataagacaaacacagtatcaaagaagttaaagtcattaggtaatgaaataacaatcatctcaaatttggatgcacatgctcaataactttttctctcagcctaaatgccttattgacagggaaaagttatatgagaggaaaacaaagtggcaagaaaactgcactggcccctcaggacaaaaactcatcagggaaagattcaaatgttttaaagttctgcaaaagcaatatgaaaaaccaaagtccagcattgggggcgggtaaaggtgggtttgtgaataggaagaaaggctggaagtttcagctcccttacagagtacctggaaaaaagacactgattagtaattacatgagctaaattctcctttagcatctcttaagtattaattctctgcaaatatttggattacaatatttccaattgcttccttgggaaaaaaatttggggnganccntttcaattttccaaacnggggaanttcccaaanccccttgg

SEQ ID NO: 58855 - DNA, 474 bp, Homo Sapiens
atcatatagtctagtctttattgaaagacttacttcaactgttgtttacagctttggcttaagttggccattttagcctctcactgccagcagacataaaaatcaagtgggaatggcacgggggttgggagtgaaaatactagtagagaaattatgagaacaaagaatatggcagtcagtcagaaacacatcaccaaaataaatctcaaaataattatgaaataaaaaacatttccttgcatgcccaaaaagtctctgctgatgtttttgatgaacggggtggggagcaacgattcttaggcttaagttggatcaagatagcattgggtcatgttataaaatcatctgttagctcaacagccatacttttaattaattcatttattttttgagatggagtctcgccccgtcgcccaggctggagtgcagtggcgcaccttcagctcaccgcaacctccacctcccaggctcaat

SEQ ID NO: 58856 - DNA, 788 bp, Homo Sapiens
  misc_feature (498)..(498): n is a, c, g, or t
  misc_feature (526)..(526): n is a, c, g, or t
  misc_feature (606)..(606): n is a, c, g, or t
ggataactcagtttcagataaaccatcttggttactgtgcttaatttggaccaaattttatttagcttaatatggacactgacacattttggggggtatacattagacatatcagagcagtgtatttctggatcattttttaaatgacctcttctaaaacataactgtcacttacctgaaatgctgcatcctaaaattccaaaattatattgagcaatcgccaaggcctaaagccaactgacttaaaggtaatcatttcagctaagattaaatttaaagcctaagaatgtatagagctagttttaaaataatgatctcagatttttaaaaaggatataggaacctgcattgtcattctctgaattaagaactgatggtttctatcattatttagccccacctttgtattttaaaatccttcagaatacatttatgaaccaatgcgactggacttagccacacacaatggaaattcagaccttgactatttggtgtttncagttcacaaaggtgatgaagactgtcntgggagcagcttaatcccaaatttgtacatttcttgcttgctctggcgtggaaacttaagtgagaccacccaatacattngtcctgttcaaatcttactgattggggtggaccctggcattaatctggcaaaaaccagaagcagagaaatatgaatatacaaaggtgtttgtttagccttcaactaaaatacatagtcaacttaatgatcctatatgatcactttcctttttgatctacatcactagatccagagtatatat

SEQ ID NO: 58857 - DNA, 520 bp, Homo Sapiens
ttttttttttttttttttttttttttgaagcgatttggggacgatcttaatcacatcagctgtgtcatcaaggaacggacagtgtgagggagggtggctgccagaaaagggcgggtgggcagccttcttcctccttacccaaggttccatcgtcctcagaactcctttccagctcagctgcttccctactttgtcactagttttttagaatccccttgaggactggatggcagggcacggtctccgcagggcccctcccttgtataggggtttcagaagagaaggtgctctcatacacagcgcagggcattggatcagtacgtagcagggtgtttcagggaggtgggagtggccttggaagcacactgggggctcgctccatctcggcccattttacttcctgttccagacagcctgaccctggattctggccttctcatgacctctgctgatcctcctctcctctcctgctgagccttccacctctgacctctcactgttcatgccggacctgtggatc

SEQ ID NO: 58858 - DNA, 306 bp, Homo Sapiens
atgtcagacgcagccgtagacaccagctccgaaatcaccaccgaggacttaaaggagaagaaggaagttgtggaagaggcggaaaatggaagagacgcccctgctgacgaggaaaatggggagcaagaggctgacaatgaagtagatgaagaacaggaagaaggtggggaggaagaaggtgatggtgaggaagaggatggagatgaagatgagggagctgagtcagctacggacaagcgggcagctgaagatgatgaggataacgatgtcgataccaagaagcagaagaccgacgaggatgactag

SEQ ID NO: 58859 - DNA, 557 bp, Homo Sapiens
tttttttttttttttttaacttccaaatcatgccatttatttttccttaatggattttacagctcatctgagtctctgctgtgttctctgaggagctgtagaatttgtgtcgatgctctgtgtcctccgtccttccccaaatgagcacatatgcagggcaggcaagagcatgctggatttgtcttagttgttaattcaccttctggcttcactgtgacacacatttatctctacatgacattctcaagaaaaatgattaggacagaatcacagcaaggagtgtggaagagggagtttttttaaaaagtcagttaaagagaagcaatgaaccacgagggtcctttaggtaaaggacccccactcctcatctcttcctcttcattcttgatctttcaaaaagaagcacaggaagaggactaggctagcaagggtgctggtaggctgcatggtgcctctgtacccattaatacctgttaacaaaaggcacccctgcctgcaggaggtgtagccctttccatggggcaaggcttggaggggatgaaatatcctccaagagt

SEQ ID NO: 58860 - DNA, 485 bp, Homo Sapiens
ccaaatagcaaaactgctgtggttcaacttcaagccatttaccaaaacaattacctaagtaatcatttcacctacaactacttttagttaaaaaaaaacaaattaagccaagtatgcaaagcacactcagatatcctccaacagtccagcattcatgaatctacacagcaaaaccattttgcatctcccagtcctcatggtttcacatggaaatcatcaggatctaattagtgactcagagaaagaaagcaataatagagtgccgtggcgcgcctgcaaaatttataggtcactaaaagtcacccatagcaacaaggcttcttgtctcaggtctgcagtgtgtcacatgccagactcctcagactcaacaggcagctctgcacatccacaatcaaggagcttgtttccacacttcatggagacttccctcttgtctagtttgacttcctctccatttttagcatcagaaacacaaggaaataaaa

SEQ ID NO: 58861 - DNA, 518 bp, Homo Sapiens
ggtctggtttctctccctcagtgtaatattcattaacaggcagatgataaacaaattatatccatacaatgggttaccattcagtataaagaaggcatgaactcctgatacatgttaagtcagctatgggtgggttgtcccacattctaacctatggaaggggccctgggcagttagcaaggagcagggaccttccagccctgagggaagttccacagttctttggactcagttatcctttctccatcagctctcatccatggtgatggtgggccacctctcacacaaggacagactacttccaagaggtcccactaaattcaaatagcattacaagaactaaaagatgaaagaaattagcttgcacaagagtctagttattcaggaagcacatatttaagaaaggggtggggtgttgggactgtcaaccattcactaagtgtagggagacattactctcatatccttatacagagtagaaaccatctgagaaattgcggcacgaggcggcacgaggc

SEQ ID NO: 58862 - DNA, 648 bp, Homo Sapiens
tgaatatattatgtatatgaggtaagcaacttttgtagagattgtatgtgtgagataatgtaatgttcttttccagtttttggactacagttgaataaactttttaattatttaaaaacatctttaccgaataacatgtgatggttttttgtataatgtatttgattttgcaaatacgtatttcctgatgtgatttttgtgagaaatgctaaatcttttagtatatcatgtcctctcaaaattggcaggagctaaataatagtttgtgggcgatttgtattgtgtactgtacaataactggggaacttttataattataaaaatatatattaacttttagtgtgttgtttaaacaaatgactggaacatactaaagatattagtaggatttttctgaatatttcagacttgaactcaggctagctttcttgagtttttcaaaacaaaatggtgtcttgtcttttaaaatcaataaattagttttcttgttacaaagtacccatattgccctatagtgggtcgtattacaattaactggccgtcgttttacacgacgtgacttggccctggcgttacccaatttaatcgccttgcagaacatccccttttcgtctgttggcgtaattcttggcctgccgttcgcccttt

SEQ ID NO: 58863 - DNA, 538 bp, Homo Sapiens
  misc_feature (218)..(218): n is a, c, g, or t
  misc_feature (480)..(480): n is a, c, g, or t
  misc_feature (488)..(488): n is a, c, g, or t
  misc_feature (504)..(504): n is a, c, g, or t
  misc_feature (511)..(511): n is a, c, g, or t
  misc_feature (524)..(524): n is a, c, g, or t
  misc_feature (538)..(538): n is a, c, g, or t
gcacaaagttaatgaaataattattttttggtcataccttgcacggaaaatctgccaatagcatttgacatttagacccactaggcatcttaagtagcctgctactcacaagacctaccttttcccactgccctattttacaaacactcttagctctgtctcctgctctcctctcctccaggaagctggagaacaatccacgaacagtagtgactaanatggcccctaatgaccatatgcttgtattatggccttcccttgagtatgggcaggatccatgaatgggatggaatacattcctttgattaagttatgctgtgtggcaaaagagattttgcaggtataaagtccctaatcagttgactctgagttaatcaaaagagagcttttcctctgtgggcctggcctaattaggtgagccccttcaaagagggtcggaggctgtcctgaagacagagattctttgggtgggttttgaanaaaccaanggctgtgtgtggaaanggccccnccttggaaacagnggggggctcatgan

SEQ ID NO: 58864 - DNA, 576 bp, Homo Sapiens
  misc_feature (510)..(510): n is a, c, g, or t
  misc_feature (513)..(513): n is a, c, g, or t
  misc_feature (528)..(528): n is a, c, g, or t
  misc_feature (530)..(530): n is a, c, g, or t
  misc_feature (570)..(570): n is a, c, g, or t
aaataataataggctttctgccccaactaaaggaattttaggcttctgcaacaagtggaggaggcattttgaagatgggacacaaagaagtcttctttctccagatccagaagtcaggccttgtaagaattcaagccaaaaaaagttcatccatgggaaaaacggttcttctatcatccagcacgtatttgtgccaacagagctgagggacttgagtaattcaagaggctaggggttggggggcagatgtgtccagtggctcccacagccccgccgtcctgaaagtcacgccagttaatgtgcctcggggtggatcagccctcccgacagatgactactaggaaattaatccccagttaataatgtgctttggaccaagtaagtcaagattatttttcctacaattatacaaagatatgcttttccagaagggaacttctggaaaaagaacaaataacactatgcttaaaatattattcacatattagagaagaaaggaaccttaaaatngcngaagaacctggattncntggatcccggggccaacccttggacatggctttgtgtganaacaaa

SEQ ID NO: 58865 - DNA, 507 bp, Homo Sapiens
aaacactcaataaaaagctttattaaccttaatatgtttcttcatagcccttgtaaaaccctagccactcttttgcaataaagcattttcaaaaagtaccatcgatccggggttatctctgtgttcttttcctggaggatcctgagtgcgggctgtgtcgacatcacgtcattaatgtcttctgctccctgcactgtggtcaaaggcttttcaacgtagccttggatcccctgggtttgctgcagttcagtgcacctcaaagcacgataacaggaactgaaatggcagaaactgaaagcaaaataaaattcagccaggaaacacttagctgtttttccctttgctatcgtttcatgcttggagttctgagagcacaaggggccccctttacttccttgtttatgtgacaacaggggaaatctcatcatcctcccctcgccaggctaactttttgaggttcaactttgtggttctctttaattctctggcattgtggacttgttacag

SEQ ID NO: 58866 - DNA, 524 bp, Homo Sapiens
cctttttttttttttttaaagtaagggatcatgcctcatcaaacagtaatgaaacaaaggcctcgagccagcttctctaagaaatataaatcaaggtcctaaatcacttcactaatacttgggtgggaaagttgaaacgatatgtgcttcttggtagctgggattctaattttctccaaaactgagttatctgccatcacacaaaatttgctaacagcctcactcattattacagattcatgtcactgcttgtgagagatgcttgctttcctcttctatgctcacaaaatcgcagccttgggcaattaatcctgataacaccaagagagacccaaatacttgctatatcatttaatgactcttggcagaaagcaaaaacacttcacttgaacatggtattataaaatatgtattttactaactttcataggaaatttaactatttgatagaatgcctttgtatgttacctgattttcatttgtacttaacaatttgtcttatggatgatacatcaaatgagatg

SEQ ID NO: 58867 - DNA, 505 bp, Homo Sapiens
gactgttttttaatcagtgccatgccaggaaaatagggatgtttccttcccagagatctgtgtgtcttttttcagaaacgtctgtgacaggcccatcaattttgaaatatttggtttttgagcctgtcactctaaaccagcgtttaacgttcaaaaggcaaataactgatgaccaggcggcacattgttctgctccgtgagtgtctggcactgggaaaggtgtagattgtctagaatgacagcaattccgacgccccagtcagtcctgcgtgattgtggcgagggcgcgtctggcaccgggaaggtgtagatcatctagaatgacggcgattccgacgccccggtcagtcctgcgtgattggcgagggtgcatctgtcgtgagaattcccagttctgaagagagcaaggagactgatcccgcgtagtccaaggcattggctcccctgttgctcttccttgtggagctccccctgccccactccctcctgcctgcatcttcagagc

SEQ ID NO: 58868 - DNA, 515 bp, Homo Sapiens
  misc_feature (8)..(8): n is a, c, g, or t
  misc_feature (84)..(84): n is a, c, g, or t
  misc_feature (379)..(379): n is a, c, g, or t
  misc_feature (457)..(457): n is a, c, g, or t
  misc_feature (481)..(481): n is a, c, g, or t
  misc_feature (483)..(483): n is a, c, g, or t
  misc_feature (490)..(490): n is a, c, g, or t
  misc_feature (494)..(494): n is a, c, g, or t
  misc_feature (496)..(496): n is a, c, g, or t
  misc_feature (505)..(505): n is a, c, g, or t
agggatanagtctatgttgcacagtctggtcacaaactcctggcctcaagtgatgtttcctcctcagcctcctaaagtattganattacagctgtaagccactatacctggcctcaaaattatattaatgtctattagttaacttgaattgtttgtgcttgtcttgttggttttaaccctacttatatacaagaattcaaaagtattttcaagccctatcatttagttgtaaaatatacccaactcacatttatagactgccaactaacttgaatgtttgtacaggcatttctgctgtgatgccatgtgtacctaaataaaactcacactctataaaatcacacactaaattaaattaacagggctatagaaaaaaganttataggcttacctctcaaaatctatagacttttgtgactagaaagcactaaaaaacagcaataatatcctattaacngttttaccggttaatctctccgcnancaacccnaatncnggggaaatncttggcacct

SEQ ID NO: 58869 - DNA, 1749 bp, Homo Sapiens
tttctaatgtgcagaaatgttccaaaaggacaaaattgaaaaccaaaaactatgttattaaaacaaaaaaatgctaacaagagaaatttaaaggtagttttctttagtaataatttatgtaagtgtcctctcttgagccctagtttcctttttggcagaatgatgtcactgtaccagacaacctcttaggtttcatcccaaatctaaacttgtggcctcttcttgacccatttgaagactctgcacttggagtgatggggccccaacagtagcaggaactttattttggggagccttatctacattcatattacttatatcactcttgtggttaaaactacacttcttcctgtgtccacatgggctaaaatctaccccctgcttctctcgaagcatcaccatccgcctcttccccagcctctcaacacaaaaacacaggatacacacacacacacacacaaaagacatagctccaaggggttccctggctacaatagcaaacagctgcccttctgtgaggaaaagagactacaaggacatgccctatcattcaactcatttatgctatgaactgtttagactcactacaaatcttcttagattatattcattaccattccctggtctgaaggagtataaaggacttattttattcagagccaagataaattcatattatagatttttatttaaacaagtaatattgttcaaaaatagtctcttataaatatactagtgttttctttacacatgacttagaaggcattagtttctctaatgccaaatttgaaggcaccagcgaatattatgtatgaagactgacattgttttacagacatgacctggcttatgataaaagaagttttatcgcattaccacttcttttcccttttcttaattagtacactaactagtactattaattacacggagtattgttgttaaaatgcaaacacaatcagggtactcacataacataaacaaagttgatattgatgtgtatggcttgggctgttcaaagccagtaagattgaaatggccgtccaaaacatactggaatatgttctttaagttttctcatagtttttaaagggactatgaattttattccaacacattgtcttccacagcatggactctgaacacatcatactttatcaacatatgaaaaagtgtattaattttatacaatttacttataggccacctttataatcacttgaagacgttatgttgctcaaacataagtggctcctttggcaatttctatatttgtggaaatttggaaaggcatagtttcaacgtgcaagaatgtaattatattgcttcatctaataatatctcacatatctgtctatcttcagattttagattttctttattaaaaaaaccatcatggtagctccatctcgtttgtaacttctccctctcaaatactcagaagaatgaagaggccaaattcagaaaatcatggcttcactgggaaatgttttaaatctacatgtagctaggatatgtgatttcatattttttaaaaatgtggtgtaaataagtgtaaaaaattaccacttgcaaagtggttttattacagcgttaaagaaaatgactagaattctgatagattgtgctgatgaacctggttgtgggcaattgaattcttgtcttcccactaccatttcatgactgtcgtctgaacactattcaacaccattaaatataaactctgatataaaaaaaaaaaaaaaaaaa

SEQ ID NO: 58870 - DNA, 560 bp, Homo Sapiens
  misc_feature (442)..(442): n is a, c, g, or t
  misc_feature (470)..(470): n is a, c, g, or t
  misc_feature (495)..(495): n is a, c, g, or t
  misc_feature (530)..(530): n is a, c, g, or t
gctgatgtccaagttatttattaacagaggggtcatcacagttgttggttatattcacagactcagctgtgactataaatgctctccaacctgctcagggtctttaatgaatggaagtgggctttgtgagactaaaaacaatttggaaagttcatgaagattacactgaggccctattgagaagctggaagtgggagcaataagatggccctctgagagcaaaaacataggagcaataccaggtatagatgggcagaccagcagagatgcctcatgggaccacaaagcagcaaggccatcagggttctcagaagaaagagagctggcctgatgtgggggaacagggcaaggagagtccctgggggataccattggcagaacccacacaagcccccggcagctgggttgcactcatgggagctggggagaaagagtgttaaanccaaaccaggtcctggccctcacaaggnttggaacagtcttagtgggaaggtnaccgaaaaaccaaccaatccctagaaccacttttncatttttcaggtggacattcagaccgattc

SEQ ID NO: 58871 - DNA, 743 bp, Homo Sapiens
caatactttaggaggccggggcaggaggatgctggggtctggaagttgagaccagccagcgcaacatagtgagacctgtctctaccaaaaaaaaaaaaaaaaatcaatttaaaggtaggctatgaaaaagtacagatacatcccttaacatagacgggagggtggtggcaaggggagcaaaggtgggaggcccagtagctgggcaaagtttagaagcagggggcaaaagctccggcctgggacttttccggggtagctccggggtcaaaatttcaggcaggatcccaggaaggggcaggcacccatggccacaggagagtggcaggcatgtggggatgtaggcctaggggaggtgctgcaggctcaagaaccaggcccacacattatatattcagaaaaaaaaaaaacccaaattgttttaatggggccagctgtgggtaaggagtcgtggttacacaacagtgacttccaggggcctggtggaatggtgaggggagtggggtccgttccaccagatgccagaccgggggccagagaagtcaaaagcccgggggggggactaaggggccggcacaagaacgggcctcaaagaaaagatgtcccggggccctactcttgggcaatggacagggttttcccactcgatctggccgcatctgcgaatgacacaactccgcaggagtaacccggagcttgctagaggaccacttcagccactctggacaaagggaataagagcaggg

SEQ ID NO: 58872 - DNA, 3715 bp, Homo Sapiens
ggcacgagggcgaggagtccgagtgtgtgagcttgagagccgcgcgctagagcgacccggcgagggatggcggccaccgggaccgcggccgccgcagccacgggcaggctcctgcttctgctgctggtggggctcacggcgcctgccttggcgctggccggctacatcgaggctcttgcagccaatgccggaacaggatttgctgttgctgagcctcaaatcgcaatgttttgtgggaagttaaatatgcatgtgaacattcagactgggaaatgggaacctgatccaacaggcaccaagagctgctttgaaacaaaagaagaagttcttcagtactgtcaggagatgtatccagagctacagatcacaaatgtgatggaggcaaaccagcgggttagtattgacaactggtgccggagggacaaaaagcaatgcaagagtcgctttgttacacctttcaagtgtctcgtgggtgaatttgtaagtgatgtcctgctagttccagaaaagtgccagtttttccacaaagagcggatggaggtgtgtgagaatcaccagcactggcacacggtagtcaaagaggcatgtctgactcagggaatgaccttatatagctacggcatgctgctcccatgtggggtagaccagttccatggcactgaatatgtgtgctgccctcagacaaagattattggatctgtgtcaaaagaagaggaagaggaagatgaagaggaagaggaagaggaagatgaagaggaagactatgatgtttataaaagtgaatttcctactgaagcagatctggaagacttcacagaagcagctgtggatgaggatgatgaggatgaggaagaaggggaggaagtggtggaggaccgagattactactatgacaccttcaaaggagatgactacaatgaggagaatcctactgaacccggcagcgacggcaccatgtcagacaaggaaattactcatgatgtcaaagctgtctgctcccaggaggcgatgacggggccctgccgggccgtgatgcctcgttggtacttcgacctctccaagggaaagtgcgtgcgctttatatatggtggctgcggcggcaacaggaacaattttgagtctgaggattattgtatggctgtgtgtaaagcgatgattcctccaactcctctgccaaccaatgatgttgatgtgtatttcgagacctctgcagatgataatgagcatgctcgcttccagaaggctaaggagcagctggagattcggcaccgcaaccgaatggacagggtaaagaaggaatgggaagaggcagagcttcaagctaagaacctccccaaagcagagaggcagactctgattcagcacttccaagccatggttaaagctttagagaaggaagcagccagtgagaagcagcagctggtggagacccacctggcccgagtggaagctatgctgaatgaccgccgtcggatggctctggagaactacctggctgccttgcagtctgacccgccacggcctcatcgcattctccaggccttacggcgttatgtccgtgctgagaacaaagatcgcttacataccatccgtcattaccagcatgtgttggctgttgacccagaaaaggcggcccagatgaaatcccaggtgatgacacatctccacgtgattgaagaaaggaggaaccaaagcctctctctgctctacaaagtaccttatgtagcccaagaaattcaagaggaaattgatgagctccttcaggagcagcgtgcagatatggaccagttcactgcctcaatctcagagacccctgtggacgtccgggtgagctctgaggagagtgaggagatcccaccgttccaccccttccaccccttcccagccctacctgagaacgaaggatctggagtgggagagcaggatgggggactgatcggtgccgaagagaaagtgattaacagtaagaataaagtggatgaaaacatggtcattgacgagactctggatgttaaggaaatgattttcaatgccgagagagttggaggcctcgaggaagagcgggaatccgtgggcccactgcgggaggacttcagtctgagtagcagtgctctcattggcctgctggtcatcgcagtggccattgccacggtcatcgtcatcagcctggtgatgctgaggaagaggcagtatggcaccatcagccacgggatcgtggaggttgatccaatgctcaccccagaagagcgtcacctgaacaagatgcagaaccatggctatgagaaccccacctacaaatacctggagcagatgcagatttaggtggcagggagcgcggcagccctggcggagggatgcaggtgggccggaagatcccacgattccgatcgactgccaagcagcagccgctgccaggggctgcgtctgacatcctgacctcctggactgtaggactatataaagtactactgtagaactgcaatttccattcttttaaatgggtgaaagatggtaatataacaatatatgatatataaaccttaaatgaaaaaaatgatctattgcagatatttgatgtagttttcttttttaaattaatcagaaaccccacttccattgtattgtctgacacatgctctcaatatataataaatgggaaatgtcgattttcaataatagacttatatgcaggctgtcgttccggttatgttgtgtaagtcaactcttcagcctcattcactgtcctggcttttatttaaagaaaaaaaaggcagtattccctttttaaatgagctttcaggaagttgctgagaaatggggtggaatagggaactgtaatggccactgaagcacgtgagagaccctcgcaaaatgatgtgaaaggaccagtttcttgaagtccagtgtttccacggctggatacctgtgtgtctccataaaagtcctgtcaccaaggacgttaaaggcattttattccagcgtcttctagagagcttagtgtatacagatgagggtgtccgctgctgctttccttcggaatccagtgcttccacagagattagcctgtagcttatatttgacattcttcactgtctgttgtttacctaccgtagctttttaccgttcacttccccttccaactatgtccagatgtgcaggctcctcctctctggactttctccaaaggcactgaccctcggcctctactttgtcccctcacctccaccccctcctgtcaccggccttgtgacattcactcagagaagaccacaccaaggaggcggccgctggcccaggagagaacacggggaggtttgtttgtgtgaaaggaaagtagtccaggctgtccctgaaactgagtctgtggacactgtggaaagctttgaacaattgtgttttcgtcacaggagtctttgtaatgcttgtacagttgatgtcgatgctcactgcttctgctttttctttctttttattttaaatctgaaggttctggtaacctgtggtgtatttttattttcctgtgactgtttttgttttgtttttttcctttttcctcccctttgaccctattcatgtctctacccactatgcacagattaaacttcacctacaaactccttaatatgatctgtggagaatgtacacagtttaaacacatcaataaatactttaacttcctaaaaaaaaaaaaaaaaaaaaaaaaaaaaaaaaaaaa

SEQ ID NO: 58873 - DNA, 642 bp, Homo Sapiens
gttggttgtaaattctcccaggagctgttttactgtctacttttcaggattaaaaaaaaaatcaaaacttaaaaaaaaaaaagtttaaaaagcaaaatggggagggggaggaagcagtgacttttttttggtaattatgcgctttttttaatttttagaatttgtctttttactgtgggtgggctgttgatatttcatcaagataagcatttctttcctgagttcaggtgactgaggaagagccacaaaacaaaacacaacaaaaccaaaccacagaatcatctttaacccaaccttttatacgatgccccagttccccataactttgcacacaagcttctgtgttcagttgaattgtaactgctttttgtatttggagagagtgactattgaacttgaaaccttttattccgggcgtcttggtagtttctggtgggattcagtgggtgagagggaagaaggggaggttggggggctccttcccttcagaacttgaagtttctcccactgcctcctctccagtggtctcccaggtgccagacccaaaagcttttcctacagtgataccctttatttttacttccccttgactcatatgttttaacatgattttaacaaactgcacttattaagaaatgtgtt

SEQ ID NO: 58874 - DNA, 1888 bp, Homo Sapiens
gactcagtttaccaatctccagccggtggccgtggggcaccttaccacccctgaacgccagttacagctggacaactcaatcctgaccgtgacctttgataccgtcagcggctctgccatgttgcacaaccgccaaaatgacgtccagatccacccccagccggaagcctcgaacccacagtctgtggcccatttcatcaacctgacgaccctggtcaactccatcacgcccttggggagccagcttagtgaccagcacccgctcacgtggcgggcagtgccccagactgacgtcttgccacccccgcagccgcaggcacccccacagcaggcggcccagccccaggtgcaggcggagcagcagcagcagcagatgtacagctactgagctgcgttccgggagactcggggcaagaactgcagagggatgtttgggatttgtttagatgtgtttgctggataccaaacaaacaaaaagtcatacattgcaatgtaaggttgacttagctttgcagagtatctccagatcccccgccagcaaccattacggtctgtcagcttaactctagaagggacctctggcaggccagagttttaaactggatggggctccacaccatgccttaccaaggcagtaagtcctgggccggggccgcatctgcctccccttacagaaccagtgttcgcccgacacagggttcgggaaagtgaagctgagagagaagcaggattttaagaggcaggagataagttattaggaacacaaatggttcattttcttttttcttttagagctcggttcctatgagaacacagacagtattcacaggtggcagcaggcagcagggaacattttctcctcacttctggatttttttgcaagcgagcacatagaagttaaagtaacgtgtattctctttgaactaggagtggagtcggttcttatacaactatgggctgaaaccatgaggcgtgctgagccgcacctgatcctgcaaccttcgaggtcatcacggtcatcatgtgcaaggggtcacgtgaggtcactgactccagctcaaaaggcatcttagtaatatccatgaatcgatttccaatagagtttttttccttttttttttttaactttatttcaaacatacattatgtgttcaagactgttatggccaatattgtgttttagttttatgttaacatgataaagtcatgtgcactgtaggaccatctgtccctgtccacccttcacagctgcccagatgcagagggtcgcgcggctgtgtgtgaggagtgagcctccctgctgcccccaggggctcctccgggttgtctcaggattctctgcaatccaaatgtatccattctggctgaagcccagccagaatcccgagtggaagaaacgggggaaaattcatattttccttctgtttaaacttcaattccaaaggtgcacagatgtattcataaaggaagacattagatccagacattgtggccaccaggctctgtggacccatctcagtggagaattcgttttggacccgtggctccgtgcagctgtggactcgagtgccatccactggtgtgagtcttgcggggaggccacaggaaaacgttctgtgccaagtgccgcctcgctgtgtccggcatgggactgcgctggagggtccggcgtggaaggcagacctcctgtacctctatcgttcccatttgtggcatccaaaggcggaaggctcatggcttccccactagaggcggcgtcttgggctttcccattggattgtgaaaggcattaagactgtttggagatgttggctgtatttcctgtcacatcaggttgtatgatgacgaataaaaggtgctgtgacccgtgttttcaaaaaaaaaaaaa

SEQ ID NO: 58875 - DNA, 473 bp, Homo Sapiens
ttttttaatttaaggatgtgtttatttacaagatacaaatgtttaatatttaataggaattaaagtgcttaattttacaatgtttccaattatctgcttttatgaccaaatatacatatattacacaatatatacattatctgcaagtattttacattcacatagctagaaaagaaaaattacttgtgtatactttcacacttgagtcaactgtaaaattccaaaaacatacattctcaaacttatcagtcaagaattcaaaagaaaaatccagatacgcttattttattttttgagtcgaagtcttgctctgtcacccaggctggagtgcagtggtgcaatctcggctcactgcaacctccgtctcccgggttcaagcaattctcctgcctcaacctcccgagtagctgggattacaggcatgtgccaccacacctggctaatttttgtagagacagggttttgccatgttg

SEQ ID NO: 58876 - DNA, 583 bp, Homo Sapiens
  misc_feature (383)..(383): n is a, c, g, or t
  misc_feature (470)..(470): n is a, c, g, or t
  misc_feature (531)..(531): n is a, c, g, or t
catcacagagttaaaatatttaatgacaaaattagggtttgttgtaatagtgaatcaatagagcaggtgttacttatctctgaattaaacaaaaattatatttgacatctcagagaacttctgaagaataactgtatgacagacatcagtagtgtcacaatttctaaaattaagagctaaacctatctttaatgccccttatttagagcatcctgtaaataattttaaatagatgcacaacctttgctagccacaaaagtagtattaaaacagttttcactgtaacttaagtctaacacgtaatctgaacttcttcagagcttgaaaaaaggtaactactgatcatgttacattttacaaattacattctttaatatggaacnttaacctggaataactggcatactttctgtacacagggtatccaataataccagtggaggaaatactacagctatattccaggaagnagtgggtaatacggggaagtttccttcccttttggaggtggtctataccatagggccctcnccggaatataggatcccaaattcctagaggagtggcggaatgggaaccaatg

SEQ ID NO: 58877 - DNA, 463 bp, Homo Sapiens
ggttgagaagtgtttattgtaaaaatggagtttataatgaaaataaaaaattatttcataacattctgataccactacacctgagttcgatgccagcatggtttgaaagtgaagctgatacaagttttctaaaggatgttaaaaaactatagtatgaagaatgtaataatattttagaagacattaaaacttaaatatttagatgctgtatatgagaaatcacaccaagctctcttaattaggttaacattagacaactacatctcaatttccaagcttccaaaaataggtaaaaaaattattttagtttaagttgatattaaaaacacattgggagcaggaatccattctttcaggttttaagaataatgttatgattattagattattatcaatgattagaaagttaatgtcaaatatcttctactttcttggttttttaacattcgattttttcattaga

SEQ ID NO: 58878 - DNA, 745 bp, Homo Sapiens
  misc_feature (34)..(34): n is a, c, g, or t
  misc_feature (740)..(740): n is a, c, g, or t
ctttgaagccctttgaactttgaagcctttcgtngctgcacgcgtacgtaagcttggatcctctagagcggccgccctttttttttttttttttttttttttatgaatgcattttttaagctttataaagtttatgtagttaataacgatgtcatcatgttagtcatgaaattacatctcagttcataaactgcaagacatctttgagtagagatccatctcattttccgtaactacacagtgatctactaaactgattttctgtaacttaagtaacccataactttaatagcactaaacattttttctaaatttttcacaattctgcaacacatttgcttatgcatctatatttctgcacttgtgctttttgagaacataactgactaggtgtagaattgtggcaaagggtaattatattcaaaatgctgacaggtaacaccacattgccctctaaaatggctttcctctaatttaccctctcaatatatgaaaatacggtttctcacacctgcgacaatactggatattatccaaacttcacattcacataaaatttctgctggtttgtgttggtggggatgaggacttttacaatctgcacttatctgatcattagtgaggttgagaacttcttctatttaaccattttaatttcttcatccaataaattttggtgacatgctctgcaaaactgtgcaccttatccttgctgctttccaacaggcccctttttcaangggct

SEQ ID NO: 58879 - DNA, 510 bp, Homo Sapiens
  misc_feature (475)..(475): n is a, c, g, or t
ttagcttttagcttttggtttgagttttaaattactaccaaatcatgaaagatcagagctgcagggcctttagggagtctaaggcagggctctaaatggaagtagttgggcctaattcaccatgtcttgtgagaccaagcacagatctaaaataattttgacttctgaatacctttgaaaagaacacaccctatcccattcctccaggtagccaccattcttggacttataccaagcagccttgctacaaaacacttctgagtttgctaagatccaagagaccagaccttctcatgacaccactgctgtcttcttgtcttcctctctgtgcagccaccttagcaaggctcagtctcagtcttgcctccagtcaccatccaaaaataaccaccacctccctcacccccaaacaaaaacctaggtgctcaggaaaggaactggtctcaagtaacttcccaacacacaactgacccangtcctcctggtaactgacagtggtggagagttttg

SEQ ID NO: 58880 - DNA, 570 bp, Homo Sapiens
  misc_feature (373)..(373): n is a, c, g, or t
  misc_feature (471)..(471): n is a, c, g, or t
  misc_feature (482)..(482): n is a, c, g, or t
  misc_feature (501)..(501): n is a, c, g, or t
  misc_feature (549)..(549): n is a, c, g, or t
ccctgttttctagaaacattttatttaaaatttaaaaccatattacttcatacagcaaactgtgcactttgatatatcacagtgtcttaaaaaggaaaataatcagatttgtttggaaatttatttacatcagcctagaatgattggcaagtaacacagttactatgaaacccaaattgttacaaaatgtttacaaaaaactatattcatagaaattctgcatgtccacaaagggcatcccctgaatggcccagagaccagtgtgtgggaaccatgttgagtgggagtggggggcgtccaggcactctggtctgggtggtgggacaggtctagggtctcagaggcccatggtgctccctgggggctcagccangagcctgggaactgaggcccctaccatgggaggcccaaccaggaagtcggcccaggcagaagtggggctggggggcttgggcgcacaattggtaagangacccatgatncctacgggaacccagacangatgctcctcatggggctggagtcaggcgtgcttggtcaagggccccnaggcagacccagagttcagtt

SEQ ID NO: 58881 - DNA, 849 bp, Homo Sapiens
gactggcagattattgcaaaaagggcacggggcagagggactatgttgtgagcctgcgaaagaagttgtgtggggactgtgggcagtgaatgcgttgggaacaatatggaaaactgggagctgccttggaatctacagggccgggctgaagaaaagaagaatggtattcatgcagttcccattttacagatgaaaacaagaggactttttctgtgaagtcaagaaagtggttacaatggtactttcagcctgtccgaattatgtattgcccctcccctttttattaataacattgaagtgtgatgggacaaccactgaagccgtctgttgaaacctgctgggactttttagccattctcttcaacataaagaatgggtgttttcggagggggtgagaggaatggggaaatgttgtcaaagagtacaatgttttagttgagacaggaggaatatattttgttgagatctacagcacagcatggtgactgtagttaacaatgaagtattgtgtatttcaaaaattgctaagacaataaatttcaaatgttctcaccacaaaaaagataggtttgacggtgatgaatctccccacaaccacaccacaacaaaaaaatttgtcgggcggctcgactagaaaagtttttaaaccctctctgagggcggggcccagcgtttattaacattggcaacggtgtaccaagagaaccggggctaggatagggtggtttccccaaaaaagcgcggcccgggtctgacacaccagtggttcgcgctcccggctctcacggccaggccatcctccgcgctgggcgtggaggaagaaaagaacataaaaagagggagacagat

SEQ ID NO: 58882 - DNA, 513 bp, Homo Sapiens
  misc_feature (205)..(205): n is a, c, g, or t
ttagtatctttagtatagtatatttataggaatgcataacatgtgagatgtacattttgaagtttcatccataacttataacatttactgtagcagtaacaagacagcaggtcatcactttacaacattacacatgagtgattttgacttacaaataaaatatttacaacctacctttacaaaacgacattgtgtgcatacaaanatgaacaacagcagaaaaatttaaaaataataaaataaccaaaaacccagaagatacacttaaggcagaccagcaagacactgaaataattaaggctgtggaattcttctgcaccttgaaaatatagagctatttatcaatactgtggagtgattttaaatcaattgttacaagcctgatggaagtatgtacttatatgtatatgtgcgatggtccctatggggaaacctgtccacttatgaataaggccctttgtctgaatggccagtgaagcccactccaaattctcaaaagacttgaggggggca

SEQ ID NO: 58883 - DNA, 566 bp, Homo Sapiens
acttaagatctggtcaatgctcacaattagtatttgctttaatgattcaagcaattttgagcaaactgatactctaagcagccagaccaggacaattgataattactagaatataaaaattaaaaatatccatgtcatgatttaaatgatcaaaagaacatgaagtctgcatttaacaattttaaacattggggtatgactaaaaaaagctggcttttatgcctgatacaacacgtggtatactaaattaaggaaatgctaatcctatctgcgtaagcagcatgttaatcgataaactttctcattccagagtatgctcaagtagtaggtatctcaacaagacaggggagtaaaaagactcaagctttggtaatgatgcatgcaatctttggaacaaactgaaaggtaacatccccatttattcttatggttctaaaaacacaaaacagccttttaatatgctaaaatcacacatgagaattaataccacaagcaatgtatttttgataggtctctatatacttgtacccatatctttcactctctgtatacttatttatctatga

SEQ ID NO: 58884 - DNA, 474 bp, Homo Sapiens
  misc_feature (5)..(5): n is a, c, g, or t
  misc_feature (343)..(343): n is a, c, g, or t
  misc_feature (389)..(389): n is a, c, g, or t
  misc_feature (409)..(409): n is a, c, g, or t
  misc_feature (424)..(424): n is a, c, g, or t
  misc_feature (438)..(438): n is a, c, g, or t
  misc_feature (466)..(466): n is a, c, g, or t
tgcantagaatatgtcagccctcagtatgggcaattttgcatctgcaaccaacttggatcaaaaatatggtattgtgggacacgaaagctgcaaaaataggccagctttttgtatccacaagttctcaacaggcaactgtggggcttgagtggattttggaatccacaggtggtcctggaactggtccccagcagacagtgagggatactacacacagacatatataggcacacaaaagataaggagggcagagagtgatcatccattaaatcccaatgaaaaccaatctactaaattctgaggataaattttcctatcctgggctaagttccagaccgaaantaagtgggccaccataaaattaatgctacagaactacagtgagggnttcctacatatataggaccnttaaaaaaaggggtnttatactgtgttcngggggcaccctgttcccctcacccgganttagggtt

SEQ ID NO: 58885 - DNA, 541 bp, Homo Sapiens
aaagttccaagccttttactttatactttgacacatttttatatcattttatctttaacaataaccctttaaggtaggaattatctgcattttacagatgataaaacaatcgcaaagaggttcattgatttgctcaagtatatcatacagcttttttttttcttttttttttttttttttttaacacacacacactatactcttagctgaggcctgtctgcgttggttgcttatcttacagcatttcttgtcttctctacttttggagcgacggctccccttttacaagcccccttatttcctctcctttcactagcccaggtgggctttccttgttttaatactgcatttaatagcacaaaaaatcacgaatacaaagaaactggcaaaggtgtttgtcaatgatatccctgcctcctccacttttctgctttcatacccatatatgtaatgggctacattttttagaaacttttctttttccccccaaacatataactgttatgtgattggtcaattgaagctgaaacacccatggaga

SEQ ID NO: 58886 - DNA, 532 bp, Homo Sapiens
ttttttctgagaacctgccagggtctgtgatctgccttttactggcatcatctcctgggatcctcccaacctctccaggttctccaggtgaggaagctgaggcttagagggactcctgaatgtactcaaggcaacacagccaggaaatgattcagaagtctgtgcccttaacctctcagtatcaaattgcccttgagggttaaaatcccagactttgggggttcaaatggtcttacgttcatatctcacatacgacctcgaagcaatggcctagaatatctcaagagtctgtggcctcactctctgcttgctataaggcttcactccagtgacaaaggatggacgccccattaagggctcaatggtgcagctggggtcacactggggaaaaagaggtttgctccagcaaactctaaactttgtagtggttctggctttaagccttggctctgctggagcaacctgagctcaccgtcccttctcaatttccccacctaaaaaaaaaacagggctggaccccactttaggagag

SEQ ID NO: 58887 - DNA, 574 bp, Homo Sapiens
tttttttttttttttttgttattcaattcacactcatgttacatattgactgggctgggagctctgttccatgtctcctttctccaggactccctgtctccttgactccagcatgggacacatgtcgagactctctgcagcaggggcagggggcacttgcttccattcagcagtgttacatactcttcctctttcattggccaaggcaagtcacgtggtcatagctgagcttcagcaggcagagaattgcagtcttgtccataagggagcattagcattactgttgttgttgctgctggtccttcagtgcgctggacttaggaagtcctcaggtggggagattgatttgactcagcctctccagtggtcatctccagcagcactctgctcagtaactcatttacgttgaagagcccttgggcttgagatgggtacaaggtggctggaagacttctaaagatgagtcatgagccaagatattacacaatccccttaagagcactcagacacttggtcatgtttttctgggatcttccaaaatgttcaccagctgaacgaagtcatttccattaga

SEQ ID NO: 58888 - DNA, 526 bp, Homo Sapiens
  misc_feature (211)..(211): n is a, c, g, or t
  misc_feature (492)..(492): n is a, c, g, or t
tttgtctttgctcactggatttttattaaacactgcaaatagaaaggtatgggtagaccttgcaccagctgcagccaaagagtggacttactcactggcttagttagcaccagtctcctccccaggtgctcttggcaaagccagtccccaaaggagcaggaggtatttcaagatgagggccagatcaggcactgaataaaaaggccaatgnttggcaagatggtcaggatgtgtcagctccactgggaccctgggggctgcaagtgaccgtctgcttgttctgtgctttgttttcggtttccccgtgcagctcggatttgggaaaatgaaacggaggaagcaagatgaagggcaggtatgtcccctgtgcaaccgccccctggcaagattcggagcaggagatgagtaggcatgtggagcattgcctttctaaggtagaggggccatcaccacccaccttccttcccgctcccttcccccgacactagctgntgacttgccctgaatctgtgggctcttggggtct

SEQ ID NO: 58889 - DNA, 578 bp, Homo Sapiens
  misc_feature (465)..(465): n is a, c, g, or t
  misc_feature (505)..(505): n is a, c, g, or t
  misc_feature (530)..(530): n is a, c, g, or t
  misc_feature (549)..(549): n is a, c, g, or t
  misc_feature (561)..(561): n is a, c, g, or t
  misc_feature (565)..(565): n is a, c, g, or t
  misc_feature (572)..(572): n is a, c, g, or t
cagtccaacacactttattcatttttaacttttttcttaattttcaataatcaagtattcaagatgctgtaaaccaagattagtacatcgacaacagatttcattaaacacacggaaattatacatcttttaaattaccttaaaaagtctccaaatgaatatcattttaaaaatcacaaaatcaaacttctttatgcaacagtgcaaaacctttcatcacaaacatacctctacacaaaacacacacacacacacacaaacacacactccactaagaacctaatgccagtttagttgacacagtattacatttccttaaacaaaagagtcagagcctgacctgcctgtttcaggattctaaattaacatttggggtttggggtagaggtatgtattttaagaaaaatgcccactatttggtactactcttaccaattatcaattaccaattggccaataatcggnactagtcttaccaatgattcttatttttcattctagaatncaaactttaaacctcttttggtcanccctttgggttaaaggggncctggaattacnttangttcaanaatatt

SEQ ID NO: 58890 - DNA, 5333 bp, Homo Sapiens
aaagtagtgaaaatgattttgaagttattggaagataaaaatggagaggtacagaatttagctgtcaaatgtcttggtcctttagtgagtaaagtgaaagaataccaagtagagacaattgtagataccctctgcactaacatgctttctgataaagaacaacttcgagacatttcaagtattggtcttaaaacagtaattggagaacttcctccagcttccagtggctctgcattagctgctaatgtatgtaaaaagattactggacgtcttacaagtgcaatagcaaaacaggaagatgtctctgttcagctagaagccttggatattatggctgatatgttgagcaggcaaggaggacttcttgttaatttccatccttcaattctgacctgtctacttccccagttgaccagccctagacttgcagtgaggaaaagaaccattatcgctcttggccatctggttatgagctgtggaaatatagtttttgtagatcttattgaacatctgttgtcagagttgtccaaaaatgattctatgtcaacaacaagaacctacatacaatgtattgctgctattagtaggcaagctggtcatagaataggtgaataccttgagaagataattcctttggtggtaaaattttgcaatgtagatgatgatgaattaagagagtactgtattcaagcctttgaatcatttgtaagaagatgtcctaaggaagtatatcctcatgtttctaccattataaatatttgtcttaaatatcttacctatgatccaaattataattacgatgatgaagatgaagatgaaaatgcaatggatgctgatggtggtgatgatgatgatcaagggagtgatgatgaatacagtgatgatgatgacatgagttggaaagtgagacgtgcagctgcgaagtgcttggatgctgtagttagcacaaggcatgaaatgcttccagaattctacaagaccgtctctcctgcactaatatccagatttaaagagcgtgaagagaatgtaaaggcagatgtttttcacgcatacctttctcttttgaagcaaactcgtcctgtacaaagttggctatgtgaccctgatgcaatggagcagggagaaacacctttaacaatgcttcagagtcaggttcccaacattgttaaagctcttcacaaacagatgaaagaaaaaagtgtgaagacccgacagtgttgttttaacatgttaactgagctggtaaatgtattacctggggccctaactcaacacattcctgtacttgtaccaggaatcattttctcactgaatgataaatcaagctcatcgaatttgaagatcgatgctttgtcatgtctatacgtaatcctctgtaaccattctcctcaagtcttccatcctcacgttcaggctttggttcctccagtggtggcttgtgttggagacccattttacaaaattacatctgaagcacttcttgttactcaacagcttgtcaaagtaattcgtcctttagatcagccttcctcgtttgatgcaactccttatatcaaagatctatttacctgtaccattaagagattaaaagcagctgacattgatcaggaagtcaaggaaagggctatttcctgtatgggacaaattatttgcaaccttggagacaatttgggttctgacttgcctaatacacttcagattttcttggagagactaaagaatgaaattaccaggttaactacagtaaaggcattgacactgattgctgggtcacctttgaagatagatttgaggcctgttctgggagaaggggttcctatccttgcttcatttcttagaaaaaaccagagagctttgaaactgggtactctttctgcccttgatattctaataaaaaactatagtgacagcttgacagctgccatgattgatgcagttctagatgagctcccacctcttatcagcgaaagtgatatgcatgtttcacaaatggccatcagttttcttaccactttggcaaaagtatatccctcctccctttcaaagataagtggatccattctcaatgaacttattggacttgtgagatcacccttattgcaggggggagctcttagtgccatgctagactttttccaagctctggttgtcactggaacaaataatttaggatacatggatttgttgcgcatgctgactggtccagtttactctcagagcacagctcttactcataagcagtcttattattccattgccaaatgtgtagctgcccttactcgagcatgccctaaagagggaccagctgtagtaggtcagtttattcaagatgtcaagaactcaaggtctacagattccattcgtctcttagctctactttctcttggagaagttgggcatcatattgacttaagtggacagttggaactaaaatctgtaatactagaagctttctcatctcctagtgaagaagtcaaatcagctgcatcctatgcattaggcagcattagtgtgggcaaccttcctgaatatctgccgtttgtcctgcaagaaataactagtcaacccaaaaggcagtatcttttacttcattccttgaaggaaattattagctctgcatcagtggtgggccttaaaccatatgttgaaaacatctgggccttattactaaagcactgtgagtgtgcagaggaaggaaccagaaatgttgttgctgaatgtctaggaaaactcactctaattgatccagaaactctccttccacggcttaaggggtacttgatatcaggctcatcatatgcccgaagctcagtggttacggctgtgaaatttacaatttctgaccatccacaacctattgatccactgttaaagaactgcataggtgatttcctaaaaactttggaagacccagatttgaatgtgagaagagtagccttggtcacatttaattcagcagcacataacaagccatcattaataagggatctattggatactgttcttccacatctttacaatgaaacaaaagttagaaaggagcttataagagaggtagaaatgggtccatttaaacatacggttgatgatggtctggatattagaaaggcagcatttgagtgtatgtacacacttctagacagttgtcttgatagacttgatatctttgaatttctaaatcatgttgaagatggtttgaaggaccattatgatattaagatgctgacatttttaatgttggtgagactgtctaccctttgtccaagtgcagtactgcagaggttggaccgacttgttgagccattacgtgcaacatgtacaactaaggtaaaggcaaactcagtaaagcaggagtttgaaaaacaagatgaattaaagcgatctgccatgagagcagtagcagcactactaaccattccagaagcagagaagagtccactgatgagtgaattccagtcacagatcagttctaaccctgagctggcggctatctttgaaagtatccagaaagattcatcatctactaacttggaatcaatggacactagttagatgtttgttcaccatggggaccattacatatgaccatacaatgcactgaattgacaggttaatcataagacatggaaagagaagtgtctaaaagcttcaaaatgttccacttttttttccttcatggagactgtttgtttggctttcttccattgttgtttttgtagcatttatttcagaaatgtgtatttccataatccagaggttgtaaaaccactagtgttttagtggttacagcaacatttgaaatggaaactaaaagttaggattttatggagtatggagatagggtccagtatctatttaccctgtaatgtttaggattaaaatgttaaaattttgtgaccatgaatttctttcttttataaattttctcatttaaaaatcaaaaatcttgcaaaacaaaaaccatgtttctttttcttgtataactttttgttttcagcaacataaattgatttttagctggcagacaagaatatccatataagatttgttaaccatttcagagagtttggcaatttttaaaagataataaggtatcatttttaagtatgaaaattaacaatatccctgttgcgcacactaattttgcatgagtaagtttacaaatatgtatcgtctgtaaagcagcatgtgcagattattcataatatagaagttaaaataagtattagtgcaattttcagatatttatttttgcacagaaaacacattatctggagagaaagaaaggagaatttttgagacttgggttttcttaatgccagtgtgaatttgcagatgttttcagaaaatcaagtcacagtaacaatttgccacttttttctgttataaatcttcttacttaaattttgaatatttagtttttctcagttacccatttgtgtgtgtgtgattccacttagaaattcttaaaaccagatttttctttcattccgtttggatgtctacattccttatcaaaggatataaatactgtgtatgcttttgaattttatttttaggaaaattctgaagccagctatcacaggtttgttagctaataatagtattttcttttagttgagttaggtttttccccatctcctgtagagcgaatttacatattgtattgggtaagtgttcactacttttcctgattaagggatctgtgctggggaacaaagcttttgcagtaccttatattgtagttaaaattttatttaacatatccttcagtgagctcatttcacactgtagcctcttccttaaaatttgtggtgctcctgtaacagtaagaactaattctgaaataaaagacatctcctaatgctgtgcaaacatagtttacatgtattgaaggaggcagttgttaaattgagtgaccaatttaagcaatcagatatttgaaaactgcaccctttagttttgaaactgtgaattagaaacacttttcctgctgtattactacctgctttaacatccaaatatacagtgattttaaatgataacatactgtggttattagattaacagcttgattttgaatgttcagatgataatgcagaagacatcacttctagtaaggattttgactagtgcattgatgttgaagttggtgccatttcaaaatgtggcaggtgataatcttttaccataatttgcataaaactgtaatagaagtttattttgagatgttagtatattatgtactatgcatttctgtggtatagatgttgtggatatatttaagtatttggttacatggttttacaataaattacaatactgcaggctct

SEQ ID NO: 58891 - DNA, 484 bp, Homo Sapiens
ttttctttttggccagagataggtcctgttttgttagtaagactgccatttccctatgtttcacaatgccgtcctatgcacaaacatcctcaaagagttgaggcagctgattttaactgatgttacagagagctgtgatagcaagaatcaagtttgaaaagtaaggtggtctggagaaaggaacagctagggtggtgatcaaagtagagaagaaaaggcaaacataaaaccagccttcttaacagaggtatgcctttataaaacacatacacgctttttaattttatgatcaaattcaccaaaaaggtcctaagaaatgttttagtagtttatatagattcttcataaaagagccctctggatggcaaccaaacaatttttaagagaaactataaaatcaagcccaccaaaataatatattatttttggttaagtgtcttcacttcacaggaagcatcccagaactgcattccatgcattttta

SEQ ID NO: 58892 - DNA, 561 bp, Homo Sapiens
  misc_feature (396)..(396): n is a, c, g, or t
  misc_feature (513)..(513): n is a, c, g, or t
  misc_feature (525)..(525): n is a, c, g, or t
gtagtaacttaaaagatccttaatgcatttattttaaaccacaaaatcaaaatacagcaatcttaaaatgaatcactataaaccatacattgtctcttcttttattatttaaatactgatatcattcttctcttcatgggacagttctgcacctagtttaaaccatcattactaatgccatgctgaatgcttgtctctgaaaaaatctagtaaaattggcagggatgtgataaccttaactacaaatgaaataacttcaaatttaaggggctgtcagaaaaatggaatttcacaactaattatttccaaaaaagtctcctgctcaccatttgttagaaggatataaaaacctagctgcatcacataggaatccttgtatccttgtcttatatttgntgcgaagttgatgtctcttaatgggtcatgtcttctacaagttggcctctgctctgctcctgatacacagaaagggaagtcaccaagtgggagctgtaatccaggtcataactgganggggtgggtagncctggtttgatgggagttacctttgacctctaaaaa

SEQ ID NO: 58893 - DNA, 573 bp, Homo Sapiens
tttttttttttttttttcatatagcaggctgaacaaagacatccaggtagcgatatgcctgtagtgattagacacagacatggctctttcattaggggatcctcaactgtcaacacctattgtcatttctcttggataatccacttccttagagaggaatctaacaaactgatgggtagggatgagaggagtggcagtgagggagtgaagtagtgccatatctatccctgcttgcaatattctcagagcacatggaaaagggaaccaggggtcaccagtcagaatagagactttcattcaggcttcattctgtccttgtgactggtgtttccaatccaaactcctccatagactgaaccttctgtcaggctgttgacccgcagcatgggggagggaatctaaagctctgacttcttagaccaaccatcagccattcattccattgaaggaaatacctggaaccttcagttccagagcctttccagagtggtagaaattaccttgcttactcaaattcacccgtaaatctaggggtttggctttctcctccgattttaataaccatcttttctg

SEQ ID NO: 58894 - DNA, 504 bp, Homo Sapiens
  misc_feature (398)..(398): n is a, c, g, or t
ggcgcctggacccactttattccgatattccgcctgcaaagcgtgtggaaagaagcgtaaggctcagggatggtagtcccagagaggagggtccctgaggctctgcgcaagcccccctccccaacctttcgggccaagtcagacgaagcctcggaaaggctgggtctgttttgctgaccaaatctccttgttagccgtttccgcctgacaagcctggcagcaggcgttggcttctcctctccgggcggccacctccaatgccgcgcggggagcaatggggcccggcctgcagagggctgcctggaccttgaagtttggaaaaacaagaagagactgagccggctccctcccttctctgcagacacacacgcaccgtcagcgcgccgccagcttcctgncttttgtttttgcttcctccaaacatttatttgggcctcttgcattagccgcggtggggctctgggttgacgataaaaggaaatacactctgaagacagttttctg

SEQ ID NO: 58895 - DNA, 562 bp, Homo Sapiens
  misc_feature (443)..(443): n is a, c, g, or t
tttttttttttttttctcacagtccttgagaacagaccctgtggctggtgcccatactgagcagggaggggcactcgggagatgcctggaacacctgtgtggtttctgtcccagtggtggccctgccctggggtccaggcccttcatacctgcaaggagtaggacacagaaaggcccaccagccccgggttcaggctgctcctcccgatgacggcaaatagtgcagcaaagagcaccacgcagttccccacgaactccactccgatgctcagccacctatgggggatcagatgaggaggaaatggggcaggggcagggcagggccagttttctgcttaggggaaaggagggacaaggaccctgaacaccagagagcctgctgggaattcctggaggagcagggagcgagggaggcggcttctgaccggttggagatgatgtangggtagcagcttctctggttggcatccaccttagtatcactgatgatctcaaaatcccggctgcggttgtaggcccggatgacactggcaccagtcactgtctccgaaaagtgggagta

SEQ ID NO: 58896 - DNA, 405 bp, Homo Sapiens
attgaatattctctgaagacaatcagaggcctgccagggagggactctgctggttccacactgtccttaggcctctttttaatactaacttgttggaactgatgcactttgtttaatgtattttaccttttttttttaaagctgctcatttagaacaaaatcaaatgcttattgcattgtatccttcctgcttgctgtttttcctcttaatttcaaaagttatgcattaaagataaaagtacacttaagaagtatgcacaagaatacctattaaaataactaccatcaagtttgatggtataacttcaaaggattaaaaaaaactattttggattaatattttgcgtgttttttttgtaaatatgattgtatataaactggtggtacgttatgacagttttaagt

SEQ ID NO: 58897 - DNA, 487 bp, Homo Sapiens
ttttatggtgcaataaataagatgtccatttattaatctgcctgttttcaaaaaattatttagcaacatacagtgagttttctaatgtagaataatgtacagcatgagccaaagatgactgccacgcaccaaaggcaagaggcacggtgtgtcacagatgtgctctctggactgagtcttatctttcttcaaaagaaagacctggaaatagccctgaatgcattcactgttggtgggttttcttttgattttgagctcacttgccctgttttcttaaagacttattatggggacataaaaacaaacaaagtatcgagtttgggagaatccacatcagtgacattgagggctataaaaaaacataaaagactgtgtaagttcctattaaaaacgaagcatttgacttctaaatactggaaacatctaatgctcaataaaatttgaagagaagtaagtggtaacatagtgtttaaagctagagattctg

SEQ ID NO: 58898 - DNA, 496 bp, Homo Sapiens
tttccttagagcaatgtataataatggggctgttaaccagttaagtgcctttctcctcttactggaagggcctgaaaattcatgaccaaagaaataacactatgaggacagtggcaccattgtgccaaaaaggttttaaaaaatgtttgccatgttgaaaaggaaaacattaacacctttaaacctttaaaaggcatcaggctgaacagggcagctggactaagatctggaatgagttacattgggttgacttatttaaatacaattaatatcagaacaaagaatgccaaggatttttatcacacttttaaaccaaattcctcattatctatcctttttttctctctttccatagcatgcagatattcccgaaagcggactaaacctgatatttacaaaaacatagttttaaatgatcaagacagtacaagtttcaacatcagctagagaacatgcacagtcataccgcctaattttgtacctgtgataaactctg

SEQ ID NO: 58899 - DNA, 466 bp, Homo Sapiens
tttttttttttttttttggaacacattcactttattggtatcagactttactcttgtccgtgggactttgcatacattgagcaactaacccgcatttcagttacattcatgtcacactttggtcatgatttagctctttggtaccaggggcaagctttgcttggtcagtagcatagggtgttgctgtgtttattggatggattccatggcccagactgagtaatgtcggggcaaggaacaacaggacaagtgctctagaaattcttgtctgtggggctgacatgacatgtctctgctttccctattaaatgtttcctgggctgaggcatgagatctcccaggcccctgaagcctggaaggggtcagaaagccaaggcagcacggctagagggcactgccagggaaagtgacccaaatctgtcccctcaaacatcagttcctctttccagggagatgggagctgtgc

SEQ ID NO: 58900 - DNA, 496 bp, Homo Sapiens
ttttttttttttttattttatttcgatttattttactttctttggcttaatttatctcgttctaaattgatacagacgacccaaataaaactttaaaatagggggtggggaagggaatgagtccgggagcaagatcctaaaaggtgcgagtttaccaggccggtgtggccgcatcccggccgttctcggagcctgaccacgccacgcccggggcttcctccgagcctcttttcccgctctctgcgccggcgccgggaagactggaaccttctccgctggtgcggatatcgatgggttcccggcagcactggcatgtgaggcggtggcgctaagggacgtcctggtttctatagggcctggaatctccgccgaggccggcgagggagaggaaacggccggtcaatcccttcagcttggcccaacttcttactggacttggagggagggggagctggtgaggaggaagccgagggtcgtggagggtctacttggccct

SEQ ID NO: 58901 - DNA, 515 bp, Homo Sapiens
tttaacagtaaaatttatttttatttttgcatattctcaaatacacatttacaatagtatcacacttcctatatgaattcttcatagttattttaagtattttacaatttgtacagaggaagggacatacaatatctaataggctatttttcaaccaaataataatttatgtccttgtaagattttgtacctctttaaaactttcaacttcaacatccacttttttagctttgctaatcaaattaagaattaaaaccagcctgcaaataataacagtatataacattaagcacaatttcatttctttctttatacaaatgttctatatttacttgaccaaatgcttaattaccttttaaaggtttcaataccgtggttaaaaacaaaacaactgtgtatacctccagactatatgaaaaatatgaaatatgtaaagtgtcacgttttttaccttagtttatttttaaaagataaatagctaactatctgtattaattttaaagaatgttttaaaa

SEQ ID NO: 58902 - DNA, 529 bp, Homo Sapiens
taaagaggatctgaaatatcagaaacagagaccggaggcaaggcacggagagggggtccccttgaagcataagattaaagggctctgctggacaaagtggaaatggccacatttgggcacagagatgtacagactgggcctccgaaagttgcataaacctttcccacaaggaattcacattcagctgatagtggcgttttcctcacttactcttattaggtaatagattagggtctcactgtttaataattgttttattaaaaactaaagaaagtttgggaaccaaatggctccaaaagccatttgtcctccaagcgactacagggcaaagtagtgagaatcatgcccatctctctgaaataaacaatcaattcaggggcttctttctacagcccaaatgttggctagatggaacagaagtgactcaatctgtcaaatacaaaatcaggagtcaccccttccagtttcagttcatcgttcaaatggaatcatatccttcctctgtttggcttttctatgggaactgcgc

SEQ ID NO: 58903 - DNA, 551 bp, Homo Sapiens
tttattagaatttgcttttattacaccttcagttaaagtacactaagcaaccttaaaacagcatgaaattcctacttccgccttgcctcacatactgggccacatttggtctttgtcacttctgaaggactcaaagtggaactgtggctttgtgctagcccctgaagcgtggattacttcttatgttgaaaacaggcatgtttccgaagatgcgctgtttggggtttgtgttccagaatcttctttgtcctcaataagccagaatttcacaaggagatattttatgtgatgagaattcggaaaaagtctagaagctactagtgtctatttactcttcacaactgtgttgctcagggtgtggcaggaagacgtttcccactcattgcttctggaagtcagcgtcggccttcactattctgcccttgtgtccttccaggggtcctcacagcacctcactcagagaagtacagtccaacagcaagccactagttgacagtttaccaaaaagttgctgcaaaatctgcctttaagttgcaggaggtaaaacttga

SEQ ID NO: 58904 - DNA, 569 bp, Homo Sapiens
  misc_feature (436)..(436): n is a, c, g, or t
  misc_feature (536)..(536): n is a, c, g, or t
  misc_feature (567)..(567): n is a, c, g, or t
gccctccctctcctgaccaaccagatccaaataacctttactggctgctaaatttctcttgagaaatcaagcaactctctagaattgcagtaataaacgacaatttcttagaaaaacatgtgtaaagtaactacagaatgaagtattcaacccacagaaaggaactgctaacacatgtaacacggaaaatagctgataaaagtctctttggtgccattcaattatggcatccgcagaaacacaaaaatcctcccaattattttagtaaaatcttcatttattcattatttcagaggctgagcaaatggtttgtgtaaacatatcctttggtaacacgcgcatgtttattttagccatctgaagacttcttctatgtttacataagccatcagacacatacaaccactcacttggtggctttgcgttttcttgaaangggtgaagggagagaagagagaatggaaccattaaatcaggttctcttttgcataaagccttcctttaaaggtttaaaaaagcttatgttaaaatatctnggatgggccttaagtttctttttaattcaanaa

SEQ ID NO: 58905 - DNA, 527 bp, Homo Sapiens
ttttttttttttttttttgtttttaaagcctttttatttttttaaaaaaacaaaaacccccaaacaaaaacaaaacctaaattaaaatatttcccattggaggctatttctttttttgtcttttaaaaattttattacacaaatatcacccattcccacgtgtcaaaggaaaaatgtccttgctctctctaaaaccaatagtggaaaacttttggaaaacaaaacaaagtccaactagcttcctccttctttggcccaaaataacctcaatgtgtcaactgagatagcataagacttatccccttaatgcttacatttaatttaaactttttagcacaacattggagattgactctaaatcagcaacaaaaaaatatatatttacaatatttctccgaaaaacaaaaaacacaaccaaaccctttaaacataagtgactttaggagttttatttatggagcagttatttttttaatcaccaagtgattttatattatatatatataaattttcttcctttcctttgg

SEQ ID NO: 58906 - DNA, 506 bp, Homo Sapiens
  misc_feature (463)..(463): n is a, c, g, or t
tcaagtgacttcaattttttattttttcttataatctttagaagattggagaagtatcatgtagaatatctcccctcccctctccccaccattcctaatcattcaagaaaaactgggatctaggaaatgcattagtagactatcagtggtattattatgtacaattggttaaagcaccatgctaataataaggccagggtcctaggactgatcattgcgagggccaattagtttaaatttgttccatggacccagactgcactcctaaccacagacaactttcttacaatgcatcccgctggtcacaagctagggtactggcaaggtggtagatggatgaaaacaaatctccactaatgaaagaaaaaagaaaagaaatcccacgtatgctgacagtgggttaacagagtcttatctgtaaagaaaagaacacatattttcttcgctctatgataaacacgtntcaagtctaaaatattcaatgacagtaacatttgactcttgca

SEQ ID NO: 58907 - DNA, 595 bp, Homo Sapiens
  misc_feature (20)..(20): n is a, c, g, or t
tttttttttttttttttganatttaaatatttatttaagtttaaaaataatcttcatggcaccaatgattttatgctaactacatactgcatatgtagaaaaaagtacattgctttgaaggaaaatgtaacttaagagtttttggcacacagaaggttaacaactatatatttttaaatgtatctaagaaattcacatttgcaggtagtttaccctctactgcttaaagatgcagtatgctattctttagtaagagttttatttcctgatagatgaagctatgaaaaccattgctttttctacaatgagataaactaattttgagagaaaatgagagacatgttagaacacagtataaccaggttaaaaacttgaacaatttttaaaggtggagatataccaaaaaagactagtcaccaatcaaaggaggtttattattcaagcactatttgaaaagcaaactgaaggaaacttttctatccatattttctgggatgagccctggaaaaaaacaaccctaaagtttctgtttacagagcaaaatttagctgttagaaatggcatagactactgtactgttagaactctagacaca

SEQ ID NO: 58908 - DNA, 511 bp, Homo Sapiens
  misc_feature (444)..(444): n is a, c, g, or t
  misc_feature (451)..(451): n is a, c, g, or t
  misc_feature (457)..(457): n is a, c, g, or t
  misc_feature (495)..(495): n is a, c, g, or t
  misc_feature (511)..(511): n is a, c, g, or t
tttttttttttgagtcaatataacatttattctgtattaataatcagtacataaattaattcaacttgaaaccttttttctacagagtactatttaatattatcatctgatccatagtaatttagtactaattttaatgagaaaaaatgaaacttttactttcataatagctcatccacttaacatttttacaaagaactactataaatatgtaacactatggcaggcttttttctacacctaggtcacaaatcaaaataaggcatactgtttatttaaaaacgggaacactttcaaactgactggctggtattcggatcaccaccttccccacaccaaattaattggctctctctgtggtactcccctctgtggccactcatggttggcgggcattatcctggggttctttggccttaacccaaccggggttccgttggtcanggctccnggggtngggtttgggtgggccgggggggcccggttccccttttncatgggggtagggggn

SEQ ID NO: 58909 - DNA, 4147 bp, Homo Sapiens
ggagtgtagaggaaataaaatcatgtctgtggctcatgacagcattccatattcagttgttgggttgtgttgttgttgttgtgtgtgtttttaataataccatgtaactgtttaaaaaaatttcctttttgatcaagtcccaaatctgccagcctgttctctcttcctaactgtggaaaaatgagacggttgcttgaacatttgttggcttggctgaagaggaaataaaaacagaacaggaggtggtagagggcatggatatctctactcgctccaaagatcctggctctgcagagagaacagcccagaaaagaaagttccccagccctccacattcttccaatggccactcgccgcaggacacatcaacaagccccattaaaaagaaaaagaaacctggcttactgaacagtaacaataaggagcagtcagaactaagacatggtccgttttactatatgaagcagccactcaccacagaccctgttgatgttgtaccgcaggatggacggaatgatttctactgctgggtttgtcaccgggaaggccaagtcctttgctgtgagctctgtccccgggtttatcacgctaagtgtctgagactgacatcggaaccagagggggactggttttgtcctgaatgtgagaaaattacagtagcagaatgcatcgagacccagagtaaagccatgacaatgctcaccattgaacagttatcctacctgctcaagtttgccattcagaaaatgaaacagccagggacagatgcattccagaagcccgttccattggaacagcaccctgactatgcggaatacatcttccatccaatggacctttgtacattggaaaagaatgcgaaaaagaaaatgtatggctgcacagaagccttcctggctgatgcaaagtggattttgcacaactgcatcatttataatgggggaaatcacaaattgacgcaaatagcgaaagtagtcatcaaaatctgtgaacatgagatgaatgaaatcgaagtatgtccagaatgttatctagctgcttgccaaaaacgagataactggttttgtgagccttgtagcaatccacatcctttggtctgggccaaactgaaggggtttccattctggcctgcaaaagctctaagggataaagacgggcaggtcgatgcccgattctttggacaacatgacagggcctgggttccaataaataattgctacctcatgtctaaagaaattcctttttctgtgaaaaagactaagagcatcttcaacagtgccatgcaagagatggaggtttacgtggagaacatccgcaggaagtttggggtttttaattactctccatttaggacaccctacacacccaacagccagtatcaaatgctgctcgatcccaccaaccccagcgccggcactgccaagatagacaagcaggagaaggtcaagctcaactttgacatgacggcatcccccaagatcctgatgagcaagcctgtgctgagtgggggcacaggccgccggatttccttgtcggatatgccgcgctcccccatgagcacaaactcttctgtgcacacgggctccgacgtggagcaggatgctgagaagaaggccacgtcgagccacttcagtgcgagcgaggagtccatggacttcctggataagagcacagcttcaccagcctccaccaagacgggacaagcagggagtttatccggcagcccaaagcccttctctcctcaactgtcagctcctatcacgacgaaaacggacaaaacctccaccaccggcagcatcctgaatcttaacctggatcgaagcaaagctgagatggatttgaaggagctgagcgagtcggtccagcaacagtccacccctgttcctctcatctctcccaagcgccagattcgtagcaggttccagctgaatcttgacaagaccatagagagttgcaaagcacaattaggcataaatgaaatctcggaagatgtctatacggccgtagagcacagcgattcggaggattctgagaagtcagatagtagcgatagtgagtatatcagtgatgatgagcagaagtctaagaacgagccagaagacacagaggacaaagaaggttgtcagatggacaaagagccatctgctgttaaaaaaaagcccaagcctacaaacccagtggagattaaagaggagctgaaaagcacgtcaccagccagcgagaaggcagaccctggagcagtcaaggacaaggccagccctgagcctgagaaggacttttccgaaaaggcaaaaccttcacctcaccccataaaggataaactgaagggaaaagatgagacggattccccaacagtccatttgggcctggactctgattcagagagcgaacttgtcatagatttaggagaagaccattctgggcgggagggtcgaaaaaataagaaggaacccaaagaaccatctcccaaacaggatgttgtaggtaaaactccaccatccacgacggtgggcagccattctcccccggaaacaccggtgctcacccgctcttccgcccaaacttccgcggctggcgccacagccaccaccagcacgtcctccacggtcaccgtcacggccccggcccccgccgccacaggaagcccagtgaaaaagcagaggccgcttttaccgaaggagactgccccggccgtgcagcgggtcgtgtggaactcatcaagtaagtttcaaacgtcctcccaaaagtggcacatgcagaagatgcagcgtcagcagcagcagcagcagcagcaaaaccagcagcagcagcctcagtcttcccaggggacgagatatcagaccagacaggctgtgaaagctgtccagcagaaggagatcacacagagcccatccacgtccaccatcaccctggtgaccagcacacagtcatcgcccctggtcaccagctcggggtccatgagcacccttgtgtcctcagtcaacgctgacctgcccatcgccactgcctcagctgatgtcgccgctgatattgccaagtacactagcaaaatgatggatgcaataaaaggaacaatgacagaaatatacaacgatctttctaaaaacactactggaagcacaatagctgagattcgcaggctgaggatcgagatagagaagctccagtggctgcaccagcaagagctctccgaaatgaaacacaacttagagctgaccatggcggagatgcggcagagcctggagcaggagcgggaccggctcatcgccgaggtgaagaagcagctggagttggagaagcagcaggcggtggatgagaccaagaagaagcagtggtgcgccaactgcaagaaggaggccatcttttactgctgttggaacaccagctactgtgactacccctgccagcaagcccactggcctgagcacatgaagtcctgcacccagtcagctactgctcctcagcaggaagcggatgctgaggtgaacacagaaacactaaataagtcctcccaggggagctcctcgagcacacaatcagcaccttcagaaacggccagcgcctccaaagagaaggagacgtcagctgagaaaagcaaggagagtggctcgacccttgacctttctggctccagagagacgccctcctccattctcttaggctccaaccaaggctctgaccattcccggagtaataaatccagttggagcagcagtgatgagaagaggggatcgacacgttccgatcacaacaccagtaccagcacgaagagcctcctcccgaaagagtctcggctggacaccttctgggactagcagtgaatcgggacacaaaccacccaccccattgggagaaaaacccagacgccaggaaaagaagaaacaacaaaggcaggagaacagccactttcagacttgaaaatgacaaaaccctcagttgagcctgagcccccggcgcgggggctgctacactacaggacacccagcatcggctttgactgcagactgttcacccacacgagccctgtgcttttggtgtaaataatgtacaatttgtggatgtcattgaatctagaggactttcccctttttatatttgtattaactttaacttattaaaaaaaaaaaaagaaaaagaaaaacgattt

SEQ ID NO: 58910 - DNA, 535 bp, Homo Sapiens
tggtctctacttctctgcttccactctctcaccctcttcctctgcttttttaatctcttgcagtccagtaacttgtgaggaactgaagttaggactgtgaacctgggataaaacacatggccttactgcttggggccagcttttctgagcttgcaggctttttcctatctctcctagccaggggcttggggtagagagcatgctggaagaaatctctgagtaagtggctgctgtaatgaactgacagctgcagctgctctctgtggctcacattaaatgctgtggcctggtgtacgcataccaaaagtcaagcaaaaattgacccacacttatcataaactctttaaaggagtgtaaaagatgagccccttctgtggagatggctctcaccgtcactgatctgcctcatgtcctggctattttggatactgtggatcatttccagaaggatttctttctcttgctcaacagcagttgctgcttctctcaaagcttcaaccctgagctccagctggtccaggctctccagcaggcg

SEQ ID NO: 58911 - DNA, 467 bp, Homo Sapiens
tttttttttttttttttttactattttaagccacaaattttgtagcaatttcttttggcagcactaggaaactagttaatacctctattgtttggttaaacaaagaacactattaagtatttttaaaacaatgtacatcagtgttgattatggtaagcatacagtttataatcagataggtttctgtgtaaaatttcatgttattatattgatttgttttaaccatacaagacttgcttggatgtggtaccattgaataccatccccattccctcctgtcccacagctttttgaaatgtatggggctttgttctagactgaacattccttttccctcaaatttcatatgttaaagccctaccccacaatgtgacagtattgggaagtgaggcctttgagaattaattaggtttagacaaagtcatgagcatagggccctcatcaacggaattagtgtccttataaga

SEQ ID NO: 58912 - DNA, 371 bp, Homo Sapiens
  misc_feature (218)..(218): n is a, c, g, or t
aagagtttttaaatttttaatgagatattccaggtgcttctgtaaaatcttaactgggacattctatatagaacacaaaatcatttcaaaatacacgttactccactttgaataccctattttaaagtgaaaaaaaaacattttaaaaaggctttgtcttgtttctaaggaaaatgaggccatgtgcttcttaaaacactattgtatggcactgagtnattcataagtatcattaaaggtcttcagccataacttaaaaggccaaacctgaggaattagaatttttattatcacaactgcatagcaaaatcatgtccagataatagacatactaaatctgtagattcagataacctggtaaaccatttaat

SEQ ID NO: 58913 - DNA, 4487 bp, Homo Sapiens
aatagcttatccactcactatgagcagattatttaacatttctgattttcaaatatctccgtctgtaaaggagactaatattagagctttgtgagagctggagatggtgtcagtaaagtaagtagcacacactggacactcagaattgttactagtattgccaaacacagcagaaaccagaacaggctgggcagagaggcctctctctggaggcaaagcctcgagcatcccaaatgccttagagctgatatcctgcctattccatgcagcccctcagccccggcccctgctttgaccgaggctgattttcatgtgcaaagccttgagttcagtctcccatgaagcaccaagtcagaaacactgtcagcctttccaagcggtagatctgtggctccagccaaaaaaaaccaggaccccctcaatctccagaagacaaaggggagccaatactaataacaccttattttcttatagtactgggtacttttagaaatattctagctgtattaatccattctcacactgctataaagaactgcctgagactgggtaatttataaagaaaagaagttcaactgactcacagttccacatggctggggaggcctcaagaaacttacagtcatggcagagggggaagcaaacacatccttcttcacaaggcggcaggagagagaagtgctgagcaaagaggaaaaagccccttataaaaccatcagatctcatgagaactcactcactatcatgagaacagcagcatgggggtaactgcccccatgattccattacctcccaccaggtctctcctatgacacctggggattacggtaactacagttcaagataagatttgggtggggacgtagccaaccgtatcactagcaacgtgggataggaagtatagctatcactccattgtttagatggggaatagggctcaaagaggttaaatcagcactgtccaatataatacaagctgcatatgtgatattattttctaaggtaaagagaaacaggtaaaattcatcttaataatgtatcttatttaaaccagtatacctcaaatattatcgttttaacatgtaaccaacactttaaaattattaatgagttctttcatactcttttcatcctaagtcttggaaatctggtgtgtatcacacactcacagcacatgtcagttcataccagtcacattttaagtgcagagtcatcacctgtggccagtggcttccttcctgggtagcacagggttaatggttaaacgctgcatctcaggtcacacagcaggttaaggaaagcagaaatgagagtgagggttccgaatttctcacgccctgttctttgcatgcatcacctgcttctcgagtgttcctgcctgcctggaggcagtatattgtggtggcgaggggtgtgaaccgtggcttagattagagattcacatcccagcagtgctgctttttagccatggggccttgagcaagttccctgtctgcactccagttttacatgtgtaaaatggtgatgataatgaggcctgccacatgaggtcgaggtgaagagtaaattcattttattaataaattagctccgtacagcacccggcatattcaagccctcagtaaatattcaggggctccccttttaaaggagtcctgcctgtgctgtaaaggctcatctgctactggaaggaggagctgcttgggcagcttttgggttgactaagagcttattcgatcagcctacttcccatgagcttgcacttccagggaccaggagggggaatggaggttgctgctggaatgtttggatttgagggtttggagttttccagtgcatccagacaaggatgcagccactctgatagcttttcacacagcaaacgctggttggcccccaccaggtgccagtcttgtgcgagataccctgggggacgctgacagtcagcagcatgacgtttcctcacttagcacggtgccaggcggacttcctgttcccgtgggtactgcatgatttgtcgtctctgtgtccttgctgacgttttatcctcccctcagtgcctttccctctcccaaatttcctcttgtccaaacccacttaaatgccacctcccctgagcctcattccttgacccttgccccagccatcctccttaccccaaaagctggaaacagacacactcctttcagattcctgtaatgctgtctctacctcccggagtcccttatgcaccctctgtcttgagggggctgccccactacaccaacatctcctgaaggactctcattgacctcgagattcttccagcacctccctcacaactggcatgggatgaacaaactcattagagaatgaatgaatggagttaatcttatctcccagtttaactgaaaagacagagacagtggcttcttctgtaaacaccacagcagaacaaacgtccatgctggcctactgagtaatagttgtcaaaggagcatgttcaaaaacacagagccctaggctgcctcccgcaaggattgtttcagcaggtctgaggtggggcccagcgagctgtatattttttcatctctctaagagattctacaacacagacaggcttggagagacccccaacttggaccatttaactagtgagaggactaacatgtacatatttatgatgcagctacagggcccatgtggacaaagtactgtgatttcatttcacaagtactcttaggtgttaattgtgtaaaggaacttcgggtcccatttggttaaaatgtagctcttatgaaaggaagttgtaggaaagaaagggggatgcctggaagggccttggattccctggaagacacttggactgtgttcagggagcagcatggaacaccgccgctgggggaatggcattatcgggccacatgagagcatgtggccaggacatctgcaccttcacaccatgttcttcttctctgacaggtctcccgtgatggccggtggactgttcgccgtggatcggaagtggttctgggaactcggcgggtatgacccaggcttggagatctggggaggggagcagcatgaaatctccttcaaggtgagccagctctccagacgccccgttcttggcacagcctcctgagtgcctgtcccagtaggtgtctcagcttctgcctgagcttggaaagactggaggcctcagggttctgtagcccttctgcccatcaggtgaagaagacaggggctcatgggccactctttgttgtggggtgggggggtgtgggagggaaggggagtactctccagctgccaaaggctggtcctcaccacagctctgactggcatttgccttgtgtcttcttaagatgttggaataaggtcttgcttctactcagatggcaggtctgagattgagatgtccagcaaataagcagtgggccagagaagctaggaaggccaaacaggatacgtaggcctagaggagtcctctcagtcaccccaagttttccctttgtacctgttgctctaggagtttgacaaagaccagtgagcataagctccagttgtaaagttacaaaggcctggattcagatcccagctccatcatcaggagctatctgactttgggcaagttagatcacccccccgagctttctttcctcatctgaaataagggaataataatactacctagcttacagagctatcgtgaagattaaatgagatcatgtctagaaagtgcttagcatacaacctgggaacatgaccagcaattaataattggtagaaattgttaaagtttcggtgagtaaatatttactgtaacctacttgaccagcctatggactctggaagctttctgacagtagtggtaaaggagttactagttaactaataactaattaagcacccaaacttccaaggctacattctccactttatttgtgggagtctgtcttgttctcaagtgaaagcttggaccttctgaggggagggttagcttgtcccatgcccttgtggcctgtcagagtcagcttctaacagcttagacccctggctaaggcatatccccagcccacaagggacagatagcaccattactgatctgacccctgtgaacacacaactctgatgccccctcatcgggcctcaactttcagtgcaaaggaccattgtcaggcacagtgaattaaggctttggtattggtgccagagtgccacgatcagatcctagctctgccgtgtcctgccagctgtgtgatcttgggcaaggaatcctcacctcactgagccttggtttctacttccataaagtgggtttaatgaaacgttaatcctcacagagttgttgagaggattaagtgagaccatgcttattaggtgcttcttaataaattatcctaaagattattaccaatacattaatattattatctgcaacagtggttgagtagttcagaactggagaacataaattcttgattagccaaaaaaaaaaaaaaaaa

SEQ ID NO: 58914 - DNA, 571 bp, Homo Sapiens
tttttgaaaataatgatgctttatttgattgacatcacatcatcataaatggcatctaatttcagaaaacaaagttcaagtccgcaaaaaatgcatgtacaaatctaaggagataggtctacagaaatagacacgtggctctgtggtccgtaaggtgcagtcaggaacctcacatcctagggtctgtctgggttcaatgttccagtggcgtgagacaaccaaggaaacagacaccccaaagagccgatgttatttttgaatatatatatatgtatatacatgtacatatgtaaatatgttgccttcatctgtaacagtgcaaacctctcacagcgtgcaaagcaacagtgtttcctacagtcaagtaactaaatcagtgaaaagttatccacacagcattataaaaacattatataattacatagcagatatatatgcacgcctttgcacgctgattagagttacttgcattgacttttgctttagaagaaataaaaaaggaaaatctttaaatagttcttcatcaaataaaaggtaacaatttgtaacagattcaactatgaacaggtat

SEQ ID NO: 58915 - DNA, 508 bp, Homo Sapiens
ttttttttcattcagatgaaacttttatttttcaaaatgtgatacagctgtttaattttcacattaacaacagccaacatctgtgtgactcattcacttaattctctatgtacacaaagcacatactatttatataaaaaataaattaagctttaataatgaaacacaagtttacaaatgcagcttcttaaggcctaatgaaaaataagaaatgtggaaatttctgagaggcaggatcactggaatctggctcttcaaaaagaaaatattttgaaaattaaaaaccagggacaaattattgagtatttttaaatgccaattttctaattctgtataattccaaatctaattattaactttttgttggttagaagatagcttttacggttgggttcaaaaagttaaatgtcacacaggttgaaggttaagctattttccttttaaagtcaaaagggttgaggtcctttttagccatcctttttgcttccaaatacaattcatcacttag

SEQ ID NO: 58916 - DNA, 491 bp, Homo Sapiens
tcaacagcttccttctcccccaagaacccagaaggcatggaacatggacgacctacagggcctgctggagaagaccaatgggtgcatgggatgaccggcagcttccctcaagtggcttcccagagactactaggagaacttggtcctatcgctgcccccacctggaagctggacttaaggatcccccaaagaacggggcaattagaaacctcccacccagcgaagggataagcttctcaactcagtcccaccactcttcatcgcaaccctctgagtctgcagcagaaacaaacatctccaagttacagaggaggggatggaatccccaaggggccgagcggtagcccttttaacttataagcctgttgattagcctatacgagttatttgcacgtcaagaaaggaagtagcctgctccttcctgcagcgtcctgctggtgtgacagcacgtccccaagctcagtgctaacctccttattaaacatcccctg

SEQ ID NO: 58917 - DNA, 485 bp, Homo Sapiens
agtaaatttgccataggtgcctatggatactgtttagatctgctggtgacatttaaagaaagagcctttgagaaacatgcatacttttctcttttctcctatattcaatactcatatagcctaaaagatggaaactggttcaagaatttaaatgacttgttccctaaaaagttaatctcctcacctttgtgaaatatatcaagtgctttctataaataagggcaggaaatgctaacttcataagcatagtcctagtcattaaaataatttgatcatcttctaaaatttaagtatgatagtaacacagtaatatggaaaatctcaatatacttaacacttcctaaacagcacaatgaaatgttgttcaaggtctgaattaatttgctacaggacctaagcaagtctgtttgcttatcttttggctttaaaattctttaagtctaaaatggtgataattttagaataaactgacaatgtggggaaca

SEQ ID NO: 58918 - DNA, 477 bp, Homo Sapiens
taacagaaattagtgaatgatgataagtggaaagattcatgtctcaatatacactatatattacactagacttttaaaattaaaaatccataattccctctccataaaaaagggtgtctatattcccagtgatatggttttccagaaatctagtccctatcaatataaatctgggaatttctgccattccagaggatctaagcttctacactaccaatactgcatactaaggtatcagcaaatgtagcactcctcctcagtctgatgtccacagcacacccgggttgatcacaggtagacccagaaaggtggttacagcactccttcctgcagagcccagatgtggtctcagaagtcttcccagcaaagtgccctagacagctagcccccagtggaccccaagatattcctggttcgaagatactcattttcaaattaaaaaaaaccaatgggagtctaagtaatttttctgcaatt

SEQ ID NO: 58919 - DNA, 552 bp, Homo Sapiens
tttttttttttttttttacctcaagaataacgtaattctttaaagatttggcaattttttcttctttgcctttggcgtgcaaatgccctgaaacaaaaacaaaagcattcactctgatgtgggtgaggagactctctggcctcagggacacatggctccccaggaaacgaatggcaacctgcacatatccaatgtatagaccagtgtatgttggtataaatctgcccccaaatcatcacccgtgctgggccttccgggaagacacgacctgcccttgttccatggggcaaggacacccagccccacactgagagcagatggcaggggtgccccacctgactcagaacctaaacaagaggcagcaaccgtggtactgacagcagtatttcatctattttctcctctcctggaattcagagatactgaattcagatactggacagcatctgaagaaacgacaaagctctcatttgacaaatcacgcacttggcggtgaagcttgttgaccgttgtccaaaaacagagtggcacttgtgggtctctgagtgggaa

SEQ ID NO: 58920 - DNA, 520 bp, Homo Sapiens
  misc_feature (11)..(11): n is a, c, g, or t
  misc_feature (31)..(31): n is a, c, g, or t
  misc_feature (515)..(515): n is a, c, g, or t
  misc_feature (520)..(520): n is a, c, g, or t
tttttttttgngtggtttagattggacgaangattattggacagaatggcatcttgtcaacacctgcggtctcctgcattatcaggaagatcaaggcagctggtggaatcattctaacagccagccactgccctggaggaccagggggagagtttggagtgaagtttaatgttgccaatggaggtatgtggttcagtatatgccttaataatcacgatttctttcctcttatattattatagtctcacagtgaccctttgatgatagacaagcaaggtgcagaggacctagctcagaaaaatttagtgaggtgcccaaagtgatccaacaaagaagtgggcatgatggggctcatgaacccatttgggtgggtctcttgggtcccctgtactcttcagcataaactattgaatagttgatgcttatctgatatgggaggactctgaattttaacattaaaacataccctgaaggtcattgtctaaatgacatgaccctcatttacacatgaacantcaan

SEQ ID NO: 58921 - DNA, 508 bp, Homo Sapiens
tttttttctttttcttcttttaattttgttcagcattaaaggagggaacttcataaacattgattgtcatttacagaaaacattcagaaatcatgtgtgcattatccgggaatgctaacagtattgaactaataatttacaggacataaaataaggacaaaaacctattacattctaaagtaatataaaactcttttttaattgttagggagtgctgttttattctagtatatttatgattaaaaaaactcaatacttacttcctaaatgactcaggctgcagttttactcacatacacagaaattagggcttatatattaaacaaggagagagagatcagaaaattgtagattttaaaactatatatgtcactgggtttatttgtggtttgcctttttcctctacaggccaataagaatacatggtaataatgtaattaaactccagaaaaatcaatggtgactataagagacattattcttttaaaaaagtagaattattattctt

SEQ ID NO: 58922 - DNA, 543 bp, Homo Sapiens
  misc_feature (130)..(130): n is a, c, g, or t
  misc_feature (162)..(162): n is a, c, g, or t
  misc_feature (168)..(168): n is a, c, g, or t
  misc_feature (198)..(198): n is a, c, g, or t
  misc_feature (205)..(205): n is a, c, g, or t
  misc_feature (210)..(210): n is a, c, g, or t
  misc_feature (432)..(432): n is a, c, g, or t
  misc_feature (439)..(439): n is a, c, g, or t
  misc_feature (447)..(447): n is a, c, g, or t
  misc_feature (466)..(466): n is a, c, g, or t
  misc_feature (483)..(483): n is a, c, g, or t
  misc_feature (489)..(489): n is a, c, g, or t
  misc_feature (540)..(540): n is a, c, g, or t
atataacacagtcagggacattttggtttttcagctgaaaccacaactagccaaagctggaaaacgttacatcaccatccatgattcaacaataacaaaaaggatgactatctaaagaagaatggtctanaaagcatcacttcatgctatgggttgaactgngccctntaataacgttgttgaagtctaaccaccagngccttanaatgngacctaatttggaaatagggttgttgcagatataattagttaagatgaggtcatactggtgtagggtgggcccctaattcaatatgactggtatcctcacaagaagacagcaatgtgaagaaacagggagaatgccccatgaagagggaagcagagattggactgatgcatttacaatccaaggaacatcaaagatggctaaccctcatgagcagctagganaaaggtntggaatanattctccctcaaagctttnttggtggcaggtgccancctgtnacaccttgattctgaggctaggctccaaactttgaaggaataaattttggngtt

SEQ ID NO: 58923 - DNA, 562 bp, Homo Sapiens
tttggccaactgagattgaaatccaagtgctggtttctagttctgaacatcaactaaagagttttggaaatgacagcaatttataacaagttcatattgacttcctctctatggcaggaagacattctgtgctgttttgaacagattaaagatttgtgtagtttgtgggaaattgacgtttttgtttaaattccacccgcgtttgtcttttcctaccacctgtggccaggtgctcgctggccatcacagttgcgattccatgagtagctgctttatgactgctttttgtactatctggatgtgcccagagttacttctgtacaagctctgtatctatgtccgttgagaacattattttaacaagaagaacaccaacagtagcatgaaatataatactgttttataattctaaagctgctgttaatttatgaagtacataataatctaatgtaaactgcagaagtcagagcaagtgcctacattttgttatttttggcattactacagagccatgtacaatagaaagcaatgcaagacttgtaaactctcaccacttcttgta

SEQ ID NO: 58924 - DNA, 559 bp, Homo Sapiens
tttttttgtttttccattcttgttttaatagcattgatgatttgcaccatttggagatagagctctggcttatttattataaaacaggagctgggcacagtggtgcctacccacaatgccagctactctgaaggctgaggtgggagaattgctggagggcaattcgaaaccagtctgggcaagatagtgagacctcatctcaaaaaaaaaaaagaaggaaaaaacaaaggagttgatgaaaccaaattatgacaaactaaattaaaaaattaaaaaatagcattagtgggaacactgtggtatttcctgaggtattaaaattttacaactagtaaaggtatttattataatttattcggattgtttcttagtttatttttgacatggataaaattattgtttatctaggagcctcagagttgagagaggatagttgtagagaagtatttctaaaatggaattatcatccactaccagctaagagaaaatagttacttgtttaaagataccttaaagcaacatatattgtagtttcaagagaacaggctgacagtcaaga

SEQ ID NO: 58925 - DNA, 570 bp, Homo Sapiens
tttttttttttttttggtggattggttttgttttagacaagttgaagctgccaaaatttcacctgccccagtggttggagcatacaattaaatggctgatttgatatgcatacacttcattcaatggaataaatctgtcggttttgattttgcctcagtctctagtgatatgtaagtacatgttgattcatttcaaattagttggccttccccaactctctccccgacttttctttccttctctctctctctttcactctttctttcctcctcctcctcctttctaaaaaacaccattgcttttgtttgtggcagtttaattatgggattgacagccattttaatctcttcaaagctccgcaactgccgcttttcagctaatccaattatatctactccacaagttacagcctcatctaaagatgattaattattgattaagccagtcaaaaagcattaggaaagatttatttaatcttttcataggctcttatttattacatggagattatggcgaatgtacctgttgagttgctaactccagtcctcccatccctagaaaggtcagca

SEQ ID NO: 58926 - DNA, 566 bp, Homo Sapiens
  misc_feature (505)..(505): n is a, c, g, or t
taaagaacattgatggggattcactgtaaagttggcagaggctgccaaagacgaaacaactgactttaaaaatgctggaacaatgtgataaaaaataaatttgtaacaaatcttctcctttttagcccttgtcattttagccctttagtttcaactctgcattatatttagtttatatagtgtaaacttttgtttgccattaattcatctttttaggtagaagacattaaaatcacaggtttatgaagaatctctgctcattggaatgaaatgcagtcatttgaaatgagaaaggccaggatccttttttgtaccttaccctgtcttcaagagtaaaggtgaacacttacagctctcctccttgtgtcaattttgtatgtgatcattccaaactgagaagataaagccacattttagacatatttatagaacaattaaagctatatgtctaaaatcgtagggcacttctgagaagaaacaccgtcttttcttttttaaaggaagngacatgtgacataaatcatgtgggggcgggacgcgagtaactgggtaatctgactgtgcct

SEQ ID NO: 58927 - DNA, 511 bp, Homo Sapiens
  misc_feature (2)..(2): n is a, c, g, or t
  misc_feature (4)..(4): n is a, c, g, or t
  misc_feature (6)..(6): n is a, c, g, or t
  misc_feature (8)..(8): n is a, c, g, or t
  misc_feature (35)..(35): n is a, c, g, or t
  misc_feature (109)..(109): n is a, c, g, or t
  misc_feature (116)..(116): n is a, c, g, or t
  misc_feature (135)..(135): n is a, c, g, or t
  misc_feature (387)..(387): n is a, c, g, or t
  misc_feature (413)..(413): n is a, c, g, or t
  misc_feature (420)..(420): n is a, c, g, or t
  misc_feature (448)..(448): n is a, c, g, or t
  misc_feature (492)..(492): n is a, c, g, or t
tnananantatcctcaacacactgcccaggctggnaatgcagtggctgttcacaggcaccatcatagctcactgcagccccaaactcctgaattcaagggatcctcccncctcagncctcctcagtagactgggnactacaggtgtgccacaatgccctgtaaagggactcagatcccaaaaagttttaaggacttatacactgtttcacggaaaagaaatatggaacagtttcaacatctcagtgctgctcaggtttaagaaaagcaacattcaggggcattgtggctgacgcctgtaatcccagcactttgggcaggtcaaggcaggcaggaggtcaggagttccagaccagcctgtccaacacggtgaaaccccatctctactnaaaacacaaaattgccaggggtgggngcagggncctgtaatcccagctacttaggaggctnaggcaggagaatcgtttaacccggtgggttatgttcagtagctnaggcagaccacttcactca

SEQ ID NO: 58928 - DNA, 489 bp, Homo Sapiens
tttttttactttttatttatttatttatttatttatttttatttttttagagaccatgtgcagtttaattgtggggaggctgaggaaagcagcattttcaccaaattggtgtaaaaataaaatggggtccacacgtgtacactggcagctacagtaaatttaaaaatctgagcagcaatttgaaccatttcttggaaaaacaaacactgacaaacactgagttggtgcctggcgcggcccgcagggttggaggccagctccgcatcatgggtgcagccccgcactgtgggcctgcatcccggggatcccagctcctcggggagtggccggtgacctcccacgcagtgggctgagccaggcctggctgagagggggccgcagccagcaggcccggatggcctcccgcgcctgcaggggacatccaggaaatgggtgcagtgtgcgggacccgcatgctgcccgaggagtctttgcagggtggacaggctt

SEQ ID NO: 58929 - DNA, 620 bp, Homo Sapiens
aattgcttcaacaatttattcattcaagagatggaacaaataaatccatttcagagaaaatggactgagggtcaaaactgggtacaggtcaaggaaaaggcagatgtagcttacactactttcctatgtgtataaaagaaactgatcttttataacctattctcagaggtgacataccaacccttcatctatactccactggccacaaccagtggtataacacaggagactacacacaagccatatgaataccaggagcgatcactgtcttggaggctggctactgacggtcctgattatctggcttaattcctgagttatatataggactgagtgtgagtctttaccacacacattctcagagttctcagagcctgggcctcactcatttcttctcatttcccttttaggtcccacgatgaaactgaaacggctcacagttttggagaagtacaaaggtatcattgactccttttaccaagagcaaaaaatgtaatcagggcctatgcctgcagtttctatagaatagagggcaggcgttccgagcctcttcctgagccccaggtctcttcagtctgggcacaggcatttctgccaagtctgttagatctccaggtcag

SEQ ID NO: 58930 - DNA, 481 bp, Homo Sapiens
tttttttttttttttttgacaaaacaaactagtgaagcacctttttacactggatctctgccgtgtcaaggtgtatagctatcctttgctaccttgcagatatataaaataaaaggatatcctggggcctcaaaatgtagaacacctttagaccatttataactgttcctagaactgttgagaatcatgttctttagtaaatgatctgtggtttacacttaagatggctagaagcttagttacagggtacatagaaatacatagatcaagtaaaactccaactactgtagctggaatttgtaaactaagtttgtaagacctcttttatttcctatggagttattctttaatttacagtttattctgtaagttgggaagtaaaatagagaaaataataaatctagatgttctcagtgtcttattcaggaactttttatccctcctcactaaggaattcccactgtgactttaaaatagaact

SEQ ID NO: 58931 - DNA, 497 bp, Homo Sapiens
  misc_feature (392)..(392): n is a, c, g, or t
  misc_feature (402)..(402): n is a, c, g, or t
  misc_feature (440)..(440): n is a, c, g, or t
ctttttctttttttttttgcacatgacagtgtttgtattgaggaccttccaaggaagagggatgctgtagcagtggtgcctgggtgcctggcctccagtgtcccacctccttcaccaccccacttggctcctttgccatcttgatgctgaggtttcctgtttggtgagatcaggttgtttgtggtaaaagaaaggaaagggcttctgatggctttgcacaagcttacctgtgggtttcagtcctgagaggccaccaccagttcccatcagcactgtctccatgcagcagttgctgggtcccatgtccagctgcctctttggcttcatgggtttttctgcttcctgccacccaccaccacatgtgcaatccccaagatttgtcctgattctanttcctggcanctccctgcctgtccttggggattctacttcttcctgtnggggagcccatagctgttggtctaacagggaagaaatgaaattgaactattgactgg

SEQ ID NO: 58932 - DNA, 529 bp, Homo Sapiens
ttttaaaggtcacttttaattgagacccaatgacaaaaggtggacaataatcaatttggtaaaacaaattaacagtaccctttaaagcttctgtttctatgtttactaatggcttccccacataggcaatatcatctagactatgctagagttttcaatgactccatcataaggactagcgatggtaacagaagctttatcactttgaactttaccgatgttatcaaactgagacactgtatctccttcttttacataacattaacagttacttttctaatcccttcttcagtgtctgagaatctgaactgaacaagctgtccacatacagcattaattgttttcagaaagttatgtggatgactatacttgaatgaaggataatcaaagaaacacacataatttggcttcaaaacatgaacattactacatgttggaaaacagtgaaacaaatcagctgcccagcattcctgctccaggtcctcagtacacagactgcagacatcttacccgggaaatggcaactgtg

SEQ ID NO: 58933 - DNA, 597 bp, Homo Sapiens
  misc_feature (477)..(477): n is a, c, g, or t
ttatgcagaattttgtttattggcatagatgcttatgatgtattgttaattgaaaaagcaggtaacaaattaatatacagtattatgttaattatgtaaaaaaagtatacatattcatagaaaaagtttggaacaatctcagatatcatctgtaggctatttctgtttgaaaataaccaaatagatttttgggttgactcaacaaattatggttgagtcagtcttactttcctattttataaatgttttttacatcattgggtatttaatcattttaaaaatctactcaggcatcatttgtataatagtaataataatttaatcccccttatttctcatgtctcatgccttatccatcatccctcatatcctactcttagcccagattttccttgacagctttattttcttggagggcaggtatggggaaccaaatttgtttccttaccctagctctagccatttctacaaaagctnttatagataatgtccattttgcttattatttttagtttaaccaatacttaatatgtgcccacagctcactacctaggccctgatttaggcattaggaataaaaactatctcgacttagtt

SEQ ID NO: 58934 - DNA, 514 bp, Homo Sapiens
atctctacagctgtctataacaaaactttttaggaaagtaccacaaatatgttaaacagaagaagcaaatctcaaataatgtgcaaaagctgtgagtttcttcttacataaaactggtacctaagcaagtgagggttcattttatttttcactcaccaatccccatatcattatacagtaacaccatacagccaaaacggccatgatattcctcccttctcagccaaaattgggcaagagagaatgacccttgtaggggaaaagaaacctctacgataaactgaaatgccaccatcagggtttgttgaaactgtaggaacagggtctacgactcacttagctgctaatgagtttctatgattccagatggagtagttcaaagtaagaagtgaaggggctggacctgtctgtgaatcagaatgagcccacgtcctccaggaaggttttttatagcctcctctcccaaatggaaaagccaaatccatcattgatgcttccatcagaacctgtagag

SEQ ID NO: 58935 - DNA, 576 bp, Homo Sapiens
acaaatctgcagtgacttttttatagtttccaattctatatggaaattttccatcttttatctccttgaatacagtaaacatacttaaagtctacctcacaatgcaattatttggtgcccctttgggtctactgtttctgccagttttcattccgcctttctcctcctgtatccagggtatgtggagatactgtatttgaaaaagtacccaaataatttgaggcctaggaaaatattcttcctccaggtttctatctttcaggttcctaggggcattagaaacctaaggtcaccttagtccacttccaaaatctcacaatttactaatccaccttgatgatttaatgctaaactacactctatgtgaatggtctacttctgtttcaccattatccctaggatgctgtccttcaggatctctaaccaaagaattctaccagagtcacaaccttggaggtcgtatacttttaacgttcgtccttctagtctcccaaagtacactactcatgttttcagcctcttcttggctaacaaatcccccctccagagcaaaagcagactgaatagcaagttcaa

SEQ ID NO: 58936 - DNA, 574 bp, Homo Sapiens
  misc_feature (567)..(567): n is a, c, g, or t
actgtgctccagtctgggcgaaagacagaatgaggccctgccacaggggcaaggcaggcaggcaggcagaaagacaacagctgtattatgttcttctcagggtaggaagcaaaaataacagaatacagcacttaattaatttttttttttcccttcggacggagtttcactcttggtgcccacgctggagtgcagtggcaccatctcggctcaccgcaacctccacctcccgcgttcaagcgattctcctgcctcagcctcctgagtagctgggattacagggaggagccaccacacccagctgattttgtattgttagtagagacggcatttctccatgtgggtcaggctggtctcgaactggcgaccccagtggatctgcccgccccggcctcccaaagtgctggggtgacaggctgacattcgtgaactggccggctacgtttatttatttattttttaattatttacttttttttagttttccattttaatctattatttattacattatttattatttaattaattactattattatttcgagacagactctcgctctgtgnccagctg

SEQ ID NO: 58937 - DNA, 3722 bp, Homo Sapiens
acgaggcagcggcgggcggctgggacggcgggtgcggcggggccgagcccgcacgatgcctcacttcaccgtggtgccagtggacgggccgaggcgcggcgactatgacaacctcgaggggctcagttgggtggactacggggagcgcgccgagctggatgactcggacggacatggcaaccacagagagagcagcccttttctttcccccttggaggcttccagaggaattgactactatgacaggaacctggcactgtttgaggaagagctggacatccgcccaaaggtatcgtctcttctgggaaagctcgtcagctacaccaacctcacccagggcgccaaagagcatgaggaggccgagagtggggagggcacccgccggagggcagccgaggcacccagcatgggcaccctcatgggggtgtacctgccctgcctgcagaatatctttggggttatcctcttcctgcggctgacctggatggtgggcacagcaggtgtgctacaggccctcctcatcgtgcttatctgctgctgttgtaccctgctgacggccatctccatgagtgccatcgccaccaacggtgtggttccagctgggggctcctatttcatgatctctcgttcactggggccagaatttggaggtgctgtgggcctgtgcttctacctgggaacaacattcgcagcagccatgtacatcctgggggccatcgagatcttgctgacctacattgccccaccagctgccattttttacccatcgggtgctcatgacacgtcgaatgccactttgaacaatatgcgtgtgtatgggaccattttcctgaccttcatgaccctggtggtgtttgtgggggtcaagtatgtgaacaaatttgcctcgctcttcctggcctgtgtgatcatctccatcctctccatctatgctgggggcataaagtctatatttgaccctcccgtgtttccggtatgcatgctgggcaacaggaccctgtcccgggaccagtttgacatctgtgccaagacagctgtagtggacaatgagacagtggccacccagctatggagtttcttctgccacagccccaaccttacgaccgactcctgtgacccctacttcatgctcaacaatgtgaccgagatccctggcatccccggggcagctgctggtgtgctccaggaaaacctgtggagcgcctacctggagaagggtgacatcgtggagaagcatgggctgccctccgcagatgccccgagcctgaaggagagcctgcctctgtacgtggtcgctgacatcgccacatccttcaccgtgctggtcggcatcttcttcccttctgtaacaggcatcatggctggctcaaaccgctctggggaccttcgtgacgcccagaagtctatccctgtggggaccattctggccatcattacaacttccctcgtgtacttcagcagtgtggttctctttggtgcctgcattgagggtgtggttctccgggacaagtatggcgatggtgtcagcaggaacttggtggtgggcacactggcctggccttcaccctgggtcatcgtcatcggctccttcttttcaacgtgtggcgctggcctccagagcctcacaggggcaccacgcctattgcaggccattgccaaggacaacatcatccccttcctccgggtgtttggccacgggaaggtgaatggtgaacccacatgggcactcctcctgacggcactcatcgccgagctgggcatcctcatcgcctccctcgacatggtggcccccatcttatccatgttctttctgatgtgctacctgttcgtgaacctcgcctgtgcggtgcagacactcctgaggacccccaactggcggccccggttcaagtactatcactgggcgctgtccttcctgggcatgagtctctgcctggcccttatgtttgtctcctcctggtactatgccctggtggccatgctcatcgccggcatgatctacaaatacatcgagtaccaaggggctgagaaggagtggggtgacgggatccgaggcctgtccctgagcgctgcccgctacgcgctgttgcggctggaggaggggcctcctcacaccaagaactggcggccgcagctgctggtgctgctgaagctggacgaggacctccacgtgaagtacccgcggctcctcaccttcgcctcccagctcaaggctggcaagggcctgaccattgttggttctgtcatccaggggagcttcttggagagctatggcgaggctcaggccgccgagcagaccatcaagaacatgatggaaattgagaaggtgaagggcttctgccaggtggtggtggccagcaaggtgcgggaggggctggcccacctcatccagtcctgtggcctgggaggcatgcggcataactccgtggtgctgggctggccctacggctggcgacagagcgaggacccccgtgcctggaagaccttcattgacaccgtgcgctgcactacggctgcccacctggccctgctcgtgcccaagaacatcgccttctaccccagcaaccacgagcgctacctggagggccacatagacgtgtggtggatcgtgcacgatggtggcatgctcatgcttctgcccttcctgctgcgccagcataaggtctggaggaagtgccggatgcgcatcttcacagtggcccagatggatgacaacagcatccagatgaagaaggacctggctgtctttctgtaccatctgcgccttgaggccgaggtggaggtggtggagatgcataacagtgacatctctgcatacacctacgagcggacgctgatgatggagcagcggtcgcagatgctgcggcagatgagactgaccaagactgagcgggagcgagaagcccagctggtcaaggatcggcactcggccctgcggctggagagcctgtactcggacgaggaagatgagtctgcagtgggggctgacaagatccagatgacgtggaccagggacaagtacatgactgagacctgggaccccagccatgcccctgacaatttccgggagctggtgcacattaagccggaccaatccaatgtgcggcgcatgcacactgctgtgaagctcaatgaagtcattgtcacgcgctcccacgacgcccgcctggttctcctaaacatgcctggcccacccaggaacagtgagggcgacgagaactacatggagttcctcgaggtgctgaccgagggccttgagcgggtgctgttggtgcgcggtggtggccgtgaagtcatcaccatctactcctgagcccagtgtcatcttgtggcctggagtcgaggtcttggccaggacataacaagctgtggtctggggtaacagcctcttcccagcacccacctgccagccctgcttgcctggccctgtcctggacccagctttgctaggtctccttggaaaccaggcctgggcctcaaaatggagatggatcccaggtcttgtgggaccctgggatgtttggggactttactatctagcaccccagtaggcctgtcctggccagagaagactggtaggggccgagtggggtttgaaggcagccggcccggcccagcccaggagcgctatttattgcatatttattgtttggatgtcaccatcagagacgaagggaagggtagccagggagggagtccagcccagctgcctgcaggaagat

SEQ ID NO: 58938 - DNA, 587 bp, Homo Sapiens
ttttcatttaattattctttatttttttgcattatgaaatagtttatacagaaagatacagagagtaagaactgactcatatactcacagccagctttatcaaattttaagaattggctatacagtatttgcttatttttaaaagaaatgaataattaaaggtattttcatttgcatcctttccccaatctcagttgtctttctccctgcaggtcaccactgttctgaatctgatgattattttattaattcttttagatcctttttatatagtatttagccatgacaaaaatacataacactaatttgcatgttttgaaattgtacgttatactgtattatataaaatagtctgtagttcaatttcattaatactatttttgaggtttacccatgttgacagaaatatctctagttattcattttagtttgcattctatcttgtatttaacctaatggttagattgctttcaacttctcattctcacagttctgcaatggaccatcatatgtatctccttgaaacacgaggagagactatgtagaggtttaaacatggaattgctgggtcaaagattattcacatc

SEQ ID NO: 58939 - DNA, 1582 bp, Homo Sapiens
gcactgagccgccgccgcttccggaagcgcagacccgctggtgccacgtttatccccttacatcctcctaggacccggtcggtagtcgtcgccccagcccgccgggggcaagcgcccaggtccgcggccctcgagacgggaccgagagcatcatgggcagcactgtcccgcgctccgcctccgtgctgcttctgctgctgctcctgcgccgggccgagcagccctgcggggccgagctcaccttcgagctgccggacaacgccaagcagtgcttctacgaggacatcgctcagggcaccaagtcgaccctggagttccaggtgattactggtggtcactatgatgtagattgtcgattagaagatcctgatggtaaagtgttatacaaagagatgaagaaacagtatgatagttttaccttcacagcctccaaaaatgggacatacaaattttgcttcagcaatgaattttctactttcacacataaaactgtatattttgattttcaagttggagagacccacctctgtttcctagtagaccgagtcagtgctcttacccagatggaatctgcctgtgtttcaattcacgaagctctgaagtctgtcatcgattatcagactcatttccgtttaagagaagctcaaggccgaagccgagcagaggatctaaatacaagagtggcctattggtcagtaggagaagccctcattcttctggtggttagcatagggcaggtatttcttttgaaaagctttttctcagataaaagaaccaccacaactcgtgttggatcataactacgttttgagaattgatgcaccattgccactgtaatattgctgtcctctaattaattttaggtactgaagaacttaatattggcaacatttttaaatccttactcatacacttgttgggagggatgtacaatgcatattcccaaactgtggaaaggacacctttttttatttgtaaaggtggaaaaactttggaactcattttgggctattcatgttaaatattcaacaccaatgatctactctgttcgcagttgtttatatctactcttcgcacactaaactttggtattttgattccttttaaccatttaagactacttttcttataggtagttgatattttaaaaactttagatttaatgtctacatgtgttagggaggaagaaaattgccttttaattgttaataagaaaaccaaatgtgatgaactgtagcccaagccctattctgcactgttcagttttatggaggaaaaataaatctaccataggaatgttagttaatattgataatcaattttgaaaatacagtggactgaaaagcaattttattctttcgaagatttcatttaaatctctgtactatgcatttttgtttcagtttgtaaatgtgtaacatttatagttaaataggacaaagcaggccctatgactattgttttcaaaaaattaatatataaataattcagaggggtttttcatttacttttgaaaagaaatttctttaacaggattgcacctatcaatttcttgtagaataaaaaaaaatctttcaacaaa

SEQ ID NO: 58940 - DNA, 436 bp, Homo Sapiens
cacttctgccatctcttggcatatccctcaccaatcctctattttgccatctgttatgggcctttcttattcttcttttctctgcctcaggttttctactgctctctgtctcctgattcctttggcccacacaatcgcaacacggtttggagtaagacgcctgcatcccggaggagcgcattttccacgccctggagctccgcaggcaagaagaccccgtgccgcaggacaggcccctgggacctccccagtgcaggttcaatgaaagcggtgactgcggaggggagacctggggagcagcaggccccggcatgaggagggaggtgcggcgaggggggggcgcgacggcgccttaggaccaggatggggtctgcaggatcccaggacctggcagaggactcggcctccccgggactggggctgcggcgcggcgctc

SEQ ID NO: 58941 - DNA, 507 bp, Homo Sapiens
atgcacataacaacagaattaaagagataaaggcaaagagagagagagccttagagtaatgagacattacctttggagcgcacggtgtaacactctttctgtaaattttacacaaaaatggcaagaaataaattgtaatacacttttaagacaagactgaatctatgttttaatatcaatataactttgaaattaattattttcaagttttatgcagagcaagaaagcttttttaaatggagggctctaaattttctttcatatgggatatttacgtagagatgaattatgcttaagaaaagcatcgtggctaagtgggaatctatttagatccttaatattgtaacatagagtgccaataatagctattaacatattacatttcctttcacaaatcccagaaattagctaagacaacattttctcaaaagagaatagtgtatcttgcatacatacataaatataaaaatctgaatgcccaggaccagttactaccagttgaaagca

SEQ ID NO: 58942 - DNA, 113456 bp, Homo Sapiens
ctgggcgtggtggcacgtacccgtaatctcagctagtcgggagactgaggcaggagaattgctcgaacccaggaggcggaggttgcagtgagctgagatcacgccattgcactccagcctgggcgacgaaagcaaaactctgtctcaaaaaataaatgaattaatgaattaattaaaaatgacatggtcaaaagctggaagggaggatgtataactaagggaaaatatgaaagaatagtgaatctatagtattaatgttttagaagagaagcatttagatatacctttcagagctattaactctccctcgaagcacacttttggagtctggattacttagagctgcagacatgcgcaaggtccttcttgaaggatttattttagattgaggagatttaaaaggctgacacacaaatagatttttgttgaccaggtcatataaaagctgtaattcagtaaaacgttcccattttttttgtttgaaatttttcaggaaagaatgttgtaaagaattaattagtctttcatgcagtgatcaccccaaggatcctgcatttcagaggataatgtgttgttgagatgaaagagatggtttctactgaggaatttgtttcaccaacaaatgggcttttatgcaatttttttgtgagttctgcaattaatcttacgttaccactacgatctgggtaaacctagtcaagtaaatgatttctagacagaaaaaagaaatgcagaactcagggaatggattctgaaggacaagctcagttcttaaaaactgttaccccttatgacttagaatcaaagaaaaatgagtgtcagatatatcttcctcattcctttgatgatgactaagtcctgaatatgttaagtgatttgcccaaggtgacttaggtaattacttgaagtgctaactccttggccagtgcttattctagttcaacagagtcccatcatatgtgcattgaatttatgtaaatttcaattattgtatatggcaaaaaaggagaaaaatactggaaaattttattttcatatactttatcacatatataaaataatatatccatatttatataatatatataaaacattcacatatccatattattgtatagagttgtatgcatacattcatgtacagtcaaccctccgtatgcacgggttctgcattgtggactcaaccaataacagattgaaaatatttggaaaaaaagaaaacaatataacaatacaatctaatataaattttaaaatatggcataacaactatttacatagcacttacattgtattaggtattataagtaatctggagatgatttatagtacagatactctttgatttatgatgagtttatctggacttaattctatcatgtcaaggagctcattgaatgcttgttgcttttgcaccattgtgaagttgaaaatcgttaagtcagggaccatttgtagacaggaggatgggtgtggattatatgcaaatactacgccattttatacgagggacttgagcatccacagattttagtatcctggatgtaggaggtggtcctggaaccaatccaccttggatactgaggggcaactatatatgttaagggtaacttaagaggtttcccaggggtaattttggctataaatgatttgcatcccatgtagaaattggaagcttaatcccctcctaacaaagcccaactccttgatttccatctttcctccatcattatattacaggtcgaattatgtccctaaacatgacatcatggtgtaagagccagatttgactcagttgaaaatgcaagtgttatttttgtcataaacaccagcaaagtaaaggggttccattatatttattcatagagtagggcggtgctgatgttggaattcagtggggagaaaggagcccccttggctgactcttctttgggtggttttaactgtcacttcaatcatcaaaaactctgcaggtatctgatgtgggcctggtacagggtttctcttttctctagttctgaccaggtacttattccagggtagctctcctgccagttctgctcttttcacctcactgtctttttcctcacttattttctagctcctcttccataccaaacttataaacgggtgtacaatcatgtttagcaattcctggtcctcttctccagacctgatttggagccactagaataactgcataacttcacatgcctgctttttcatgcactcaaaagaaacatgtggaaaatatagactgttagaatcagtctgttagaatctgagatactttacaggtcaactggtccaaatgcctgattctaaagatctcaaaagtgagacccagggaggattttcaaggttatgtagctttaatggcagagagagtttttctcaccgctttaagctgttatagaagtttcaataaagaaacattacaggccgggtgcagtggctcacacctgtaatcccaacaccttgggaggccgaggtgggtcgatcacctgaggtcaggggttcgagatcagcctggccaacacggtaaaaccctgtctctaccaaaaataccaaaaattagccaggtgttgtggcgggcccttgtaatcccagctactcaggaggctgaggcaggagaaccacttgaacccaggaggcggagtttgcagtgagccgagatcatgccactgtactccagcctgggtgacagagcgagactccatcacaaaaaaaaaaaaaagaaaagaaaagaaacattacagatagatgagagccacaaagacggagcctccaatctttatgaaaaatattattttgttttattttgagatggtgtcttgctctgttgccgaggccacagtgcagtggcatgaacatggctcactgcagcctcaacctcctgggctcagggatcttctcacttcagcctcccaagtagctgggaacacattccggcaccaccacacctggctagtttttattttttaagtttttgtagagatggggttttgccatgtttacccaggctgctcttgaattcctggacccaagcattcctcctgactcagcctcccaaagtgctgggattacaggcataagccactgtgcctggcagaaaaatgattttaaaaatttggatctttagtcctggacatcatgtaacctgcatttgcctctcctgcgccccaaaggaaatgttataataatacaacacttgtggatttagaacacattatggaaaccagtcatttactaaatgtattgcggaaactgagaatgtacttaccatcgaggggggaaaagtgaaggagatgctttaggagacaccctcagataaacaggtttccacatttgtgttgggaaacagcaagggcttcctcaggctatgtgctcaacaggacaaaaacctggcccagagccacagcaggagacctactttatgtctttgaacatattaagacacacctaatgtgtgggcattgtggggagctaatttcttccctgaatgtgacaatgaagttcttttaagagaaaagaaccttgtagattcaacaattgtcaaacaattgtgatggaatttttaaagccaaaaaaacaaaaaaaaaatggcaaggcctgattcttggttattgttattgctgtattggttattcatggaggagatgaatatgaaacaatattcttttttctttttcttttttgcggagaccagctcagtaggggagaccctaacccagcagcgctagaggaattaaagacacacacagaaatatagaggtgtgaagtgggaaatcaggggtctcacaaccttcagagctgagagccccaaacacagatttacccacgtatttattaacagcaagccagtcattagcattgtttctatagatattaaattaactaaaagtatcccttatgggaaacgaagggatgggccaaattaaaggaataggttgggcttgttaactgcagcaggagcatgtccctaaggcacagatcgctcatgctgttgtttgtggcttaagaatgcctttcagcggttttccgccctgggcaggccaggtgttccttgccttcattcccgtaaacccacaaccttccagcgtgggcgttatggccatcatgaacatgtcacagtgctgcagagattttgtttatggctagttttggggccagtttatggccagattttaggggggcctgctcccaacaattttgagacagggtctctgtctgtcacccaggctggagtgcagtggagtgatcatggctcactgcagcctcaacctctcaggctcaagtgatcctcccatctcagcctccctagtagctgagactataggcatgcaccaccatgcctggctaatttttgtattttttgcagagttgaggtctcaccatgttgcccaggctgggcttgaactcctggcctcaagcactcctcccacctcagccacccaaagtgctgggatcacaggcatgagccaccacgccaggcctgaaacaattttcaaggaagaatgagaagtggtctttgggataccttgggttaatatttctgacaaataagttggaatctagaaagatatactctcacttgtaagttacagcgaaatctggtttgttgttccaagattattgatattctgtggagtgatcccagaggcaaaaatggctgttttccaaatacgtgccgaggagggggctgctattttggaccagatgttacttccaagattcttaataaataccagttgaagatgctcatcaggtctcatgaatgtaagcccgaagggtatgaaatctgtcatgatgggaaggtaagctaaaattgttggtgacattcccataaacatccttcccctaagcacagtcttttcttcacagagcatgtctggcctagaagcccatgagaagatgtcttctctagtaccaaacagaaaccagagaaggcgagcttcatctaggttgtttgaaggggcctcactgtcccttatcctaaaagatatttggtttatttccctgatcttccctaatcccagaaacagaaattctttttttttttttgagatggagtctcactctgccacccaggttggagtgcagtggtgtgatctcagctcactgcaacctccgcctcccgggttcaagtgattctcgtgcctcagccacccaagtagctgggattacaggtgtgcgccaccacacccagctaatttttgtatttttagtagagacagggtttcaccatgttagccagactggtctcaaactcctgacctcaggtgatccgcctgcctcggcttcccaaagtgctgggattacagtcgtgagccaccgcgcctggccccagaaacagaaattctgatacatggcactaagtagacacacagaaaggcttggttcttataaggcaactgtcccatacagtggggttgagaatgtccttttcctcacagagcgcataaaaggcagcagtgaatccagtttgctcttgcactttttacatgttccctgtgcagggcccaaaacacaaaacacacttcccttcagctccctgagtaggtgacctccagcaagttgctcactgtagtcagtttagctgcagccactaaaacggagtgtgttgtgttccttcagtggtgtctgatcaaaggctaaaagaggtgaggaccgaggagctggtttcttgtcccaagttgttctgggatgcaccgtttcttttttttttcttttttcttttttttgagacagagtctcgctgtgttgtccaggctggagtgcagtggtgcaatctcggcttactgcaacctccgcctcccgagttcaagtgattctcttgcctcatgctcccgagaagctgggattacaggcgcccgccactacgtccagctaatttttgaacttttagtagagacaaggtttcatgatggccaggctggtctcaaactcctgacctcaggtgatccacctgcctcagcctcccaaagtgctgggattataggcattagccaccgcgcctggcctggaatgcacctttttctatagtgaacagcaataaataaaaatggacaccaagttgtgtggcatttccctctgtgtcagcactttgtttttctgacctttattaattcattttcagctcatactaacattccaagatgagtaaggcaagtattgtttagggtttctttgtagtaagaaaatagatagaaaacatcagtggcttgtctgaagtgacatgctcatcaggacagaacggggcctaaaccaggttccctgtcacccacaaatattgtcctcctggctgggcacggtggctcatgcctgtaatcccagcactttgggaggccaaggcaggtggatcacgaggtcaagagatcgagaccatcctggtcaacatggtaagaccctgtctctactaaaaatacaaaaattagctgggcgtggtggcacacacctgtagtaccagctactcgggaggctgaggcaggagaattcctggaacccaggaggtggaggttgcagtgaggtgagatcgtgccattgcattccatcatggtgagagagcgagactccatcttaaaaaaaaaaaaaaaaaaattgtcctcccatattctaccacagcccaaggctagttccttcacaagacagtggtcgtggtcccttattctagccactgcacctctgcccttaaagcactgactttctggggccctgaaccctctaaatcactcagctccaagcagaagaaaaaaaccgaagtaccagacaaattttgttctgaatgctcaactattacaaggcaagaaaataggggatttatccccttggaaaaagaatttgcaaaatcaaacattaaagaggattctgagatttggcactaaaattgtacccgagaatgcagggccatgcgctgaggacattggctgagtggccaggagttagtgctgctggggacactgggtagtagccttgttttcctccgatgcagtcatagaaatcacatcagactgtgatgatttgcagggtttatgaaccttctttgatttttgctttttaagaattgagctatttctgaccttattgaatgaccttttgagaactaatgttacgtgaacctgaccctctttttctttaaccaggtggtgactatattttctgcttctaattattatgaagaaggcagcaatcgaggagcttacatcaaactatgttctggtacaactcctcgatttttccagtaccaagtaactaaagcaacgtgctttcagcctcttcgccaaaggtgtgtatactataccgagagtgctgagcactggtatcacggacccattagaaccagtcccacgtgactaagagcagccacgtgagtgaagagagtcatttatagcttactcattagtatcaacaaaatgtaaatagttccagacaccaagtggtgaatgcacccatatttgaaaccaaaaagagcaattttaaattcatacatctttttagatggataaagcagtcagccctcagaaacgtaactgaatgtaaagaaaagaagatccccacacccactcagtcccccaacctacaaccttctctgacccacaaacagctctatctggtcttgcccctttctcttctctatccagaagtgtatgtgacaaatagttgagtgtctctctccatgtgatggcatttgtagcttatactccttttctccctttaacattatctttctaagtgttttttttggttttttttttgtttgttttttttcatttgttttttgtttttttgagacggagtctcgctctgcagcccaggctggagtgcagtggcgtgatctcagctccctgcaacctctgcctcccaggttcaagctgttctcctgcctcagcctcctgagtagctgagattacaagggcccgccacaacacctggctaacattttatatttttggtagagacggggtttcaccatgttggccaggctggtcttgaactcctgacctcatgtgatctgcctgccttgacctcccaaagtactgggattacaggcatgagccactgcgcccggtctaagattttttacattatagaactaacatgtttgttgttaacaactgaaaaaaagcaaagaagaataaagaaattgttaacaacttctctcctttctcaattatccttttccccagaggtaactaaaactggcagtttagaatggccccttccaccctcttcttgctcttacaaaaatagtcaagcatttattcagtcattgaattaaaaaaaacctttgagtacctgccatgtgtcagatactattctaggcatacataatataagataggctgaagtcccctcatcaaacacatatctcagtgtgaagagaaagacgataaacaatgtacatacttttttttttaaagaaggagtcttgctctgttgcccaggctggagtgcagtggcacgatcttggctcactgcaacctccacctactgggttcaagtgattctcctgtctcagcctcccgagtagctgggactacgggcatgccccaccacgctgggctaatttttgtatttttagtagagacggggtttcaccttgttggccaagctggtattgaactcctgacctcaggtgatttgcccgcctcggcctcccaaagtgctgagattacaggtgtgagctaccacgcccagcctgtacgtacattttttttttttttttgagacggagtcttgctctgttgccaggctggagtgcagtggtgcgatctcagctcactgcaacctctgcctcttgggttcaagcaattctcctgcctcagcctcccaagtagctgggactacaggtgcacgccaccacacccagctaatttttgtttttttagtagagagggggtttcaccatgttggctaggatggtctcgatctcttgaccttgtgatccgcccgcctcagcttcccaaagtgctgggattacagtagtgagccaccacgcccggccgtacgtatattttttaaagaaagaatcacactgcatactgtattctgcaactgaatttttcccctaaaaattttatcatgaacatcaccgcaagttagtaaagatagacctaactcattctttttagtacatacatattattctgtagtatacatgtaccataacagttatggagcaactaaatcttatccaattgatagacatccagattggttccaggattctgcatttaaaaacaatgctataactagcattcctatatataaggaactcatacgactcaacagcaaaaaaaaaaaaaccaagtaatccaatttaaaaaataggcaaaggacctgaatagacattttcccaaagacatacaaatggccaacaggtatacgaaaagatgctcaacgtcactaattatcagggaaatgcaatgcacagccacaatgagatagataccctctctcaccggttagaatggctgttatcaaaaagacaaaacctaagtgttgaccagggagtgtagaaaagggaacgcttgtactctgttgataggaatatggattagtacagccattatagaaaacggtatagaagttcctcaaaacattaaaaatagaagtaccatatgatccagcaatcccactactgggtatatatccaaaggaaatgaaatcagtatcttgaagagatatttgcattcccatgctcagtgtggcattattcacaatagtcaagatatggtaacaaaccaagtgtctatcaagacagaaaaagaaagtgtgactgatatacgtgtgtggatttatatattatatatatatagatatatcacattatatctatctatctatctatctatctatctatctatctatctatctatctagtaattccttgatatttgtagggaattggttccaggagccctctcagataccgaaatccctggatgctcaagtcacttatataaaatagcatggtatttgcataaaacctatgcacatccttccatatactttaagtcatctctaaattacttataataccgaatgcactataaacactatgtcaatagttgttatactgtattgtttagggaataatgacaagaagaagtctgtacatgttaagtacaggcacaaccatctgttttaaaaaaaataaatttggccaagcgcagtggctcacgcttgtagtcccagcactttgggaggccgaggcaggaggatcatttgagcccaggagttcgtgactagctgggcaacatggtgaaaccccatctctacataaaatacaaaaattagctggacgtgatggcgcacacctgtaatcccagctactctggaggctgaggcaggagaatcacttgagcctggaaggtcaaggctgcagtgggccaagactgcaccactgcactccaggttgggcaataaagtgagaccctgtctcaaaaaaaaaaaaaatccactgaagggaaacccatgcatacagagggctgattgtacatgcacaatggaatattattccaacataaaaaagaaatcctgacattatgacaacatggataaacctggagggcattttgctaagtgaaataagtcagacaaatactgtatgacatcacttatatgtggaatctaaaaaagctgaactcatagaaacagagagtagtatggtggttgccaggggctgagaggtggaggatatctggagatacaggtatatcaaatcatcacattgtataccttaaatatgtacaattttatttgccagttataaatatgttatagttttatgtcaataaagctggaaaaaatcctctgtgtgtgtgtgtgtgtgtgtgtgtgtgtgtgtggacatatatccataagttttagtggcttttttaatgtaagattttacaatgtggaatttatggaatttatatgtttaaaattttaatagctacttcagaagggttataacattggacaatctgaaaaacaacataccatatttatttataatttcattataatttttggatctgtacctttgtttagaaaatttctctttctctgtctctgcctctctctgcgcacacacacacacacacacacaaattctcaaatttaacagctacgttgagatgtaatttacataccacaaagtttacccatttacaattcaatgacagtacgtttagagttgtgcaactatcaccattatctaacttttgaacatttttgccatcctaaaaagaaaactcatacccactgagcagtcatttctcagtcacctcctcccatcacagccctaggcaaccactaatctattttctgtctctatggatttgcctattctcggcatttcatataaatgagatcacacaatatgtggtcttttgtggctggcctctttcactcagcacaatgtttttgaggtcattcatgttgtattctatatcagtacttcattccttcttatgggtgaataatattccattgtatggatagaccacattttgtttgtccattcatgagttgatagatatttagggtgtttccactagttggctattataaacaatggtgttatgaacattcatgggcaagtttttgtgtgtacatgtttcatttctcttgagtaaatacttggtaatggaattgctgggttatatggtaactctgtgtttaacattttgagaaacttgcaaacttttttcccaagaagctaaccagtttaccatttccaccatcagtgtgtgaggattccaggttttctacatcattgccaactcttgttatgatctctttttatttatttatttttttgagacagagtttcactcttgttgccccaggctggagtgcagtggcacagtcttggctcactgcaacctccacctcctgggttaaagtgattctcctgcctcagcctcccgagtagctgggactacaggcatgcgccaccatgcccagctaatttgtgtatgtttagtagagatgaggtttctccatgttggccaggctggtctcaaactcctgacctcaggtgatttgcccgcctcggcctcccaaagtgctgggattacaggtgtgagccaccgcgcccagcttgatctctcttttttcttattgttctcttagtggtgtgaggtagaatctcattgtagtgttgcgttgtatttccctaatgattaatgatgttgagcgtctttccatgtgcttattggacatttgtacatcttctttagaaatattatatttcaggtacattttccatttttaattgtcactctttatttttgcattgcaagagttctttattctatatacacatcacttattcagtatatatatatatatatatatatatatattttttttttttttttttttgagacagggtctcactttgttgcccaggcaaaggcgatcatggctcactgcagccttggcctgcggggctcaattgatcctcctgcctcagcctctgaagtagctggggctacaggcacaagccagcacacttggctaatttttgtatttttgatgaaacgggatttcaccatgttgcccaggctgatcttgaactcctgggctcaagagatccacctgcttcagcttcccaaagtgctgggattacaggcgtgagccaccacgactggccacttgttcagtatttgatttgcaaacattctctctcattctgtgggatctcttatccctttctctgtggtattatttgtagtgcaaacatttttcattttgatgaaatccaatttatgtgcttttttggtggtgttgtatctaagaaggcattgcctaactcagagtcataaggattcattcctatgttctcttctaagagttttataggtttagctcctacacttaggtttctgatccattttgagttaatttttgtgtatggtgtgaaggaagggttcagctttattcttttacatgtggatatccagttgtcccagaaccatgactcaaagactgttctttccttcttggcactcttgtcaaaaatcagttgaccataatataagggtttgtttctggcctttaaattgtattctatttgtctatgtctatgtctatcctaatgctaggaccacactgtcctaattattgtaactttacaaacttactacagttttaaaactggtaaatgtgagttgaacgttgcacttctttttaaagattgttttggctattttgggtcccttgcattttcatgtaaatttcagaatcagcttgtcaatttgcaaaaataccagctgagaatttgatagggattatgttgagtctgtagatcaatttgaaggctgttaccatcttaacaatattaagttgtccaatccatgaacatgaaattttgttctatttaaatcttctttaatttcctccaataatattttgaacttttcagtgtacaagtctaggacttattttgctaaatttatttctaaatattttattccttttgctgctatagtaaatggaattgtttttcttttctttccttttctctttttttggagacagggtctcactcagtcacccaggctggagtgcagtgatgtgatcatagctcactgcaccctcaaattcctgggccttacattaaaattagcttgcaccaccacacccggctaattttttcaattttctgtagagacagggtcgcactatgttgcctaggctgggtctcgaactcctgggctcaagtgatcctccagtcttggcttcccaaagtgctgggattacagatgtgagccaccgcacttggcctgttttcttaattatatttttagattcttgatttctagtgtatagaaatacaattgattggccgggcacggtggctcatgcctgtaatcctagcactttgagaggctgaggcgggtggatcacgaggtcaggagatcaagaccagcctggccaatatggtgaaaccctgtctctactaaaaatacaaaaattagctgggtgtgatggcacacgcctgtagtcccagctactcaggaggctgaggcagaagaatggcttgaacccgggaggcggaggttgcagtgagccaacatcacgccactgcactccagcctgggccacggagcaagactccgtctcaaaaaaaaaaaaaaaaaaaacaattgatttttggatattgatcttgtacaatcttgattaacttgttagttttaatctttttctagtagagtcattgagattttttataacctagatcatatctgttaatggagacagttttacttcttttccaatctggatcccttgtatttatttttcttgtataatcatcctggctaaaacctccagtacagtgttgaataaaactggtgagggcagatatacctgtcttatttctgatcttaagggaatgcattcactctttgataattaagtatgatgttagctgtgtatttttatagatgcctctcgtcaagtggaagaagtttctttctatgcctagtttgggtagtgtttttatcatgaaagagtgttgaatttcatcagataaattttttctgcatgcattgagatgatcatgtgatttttgtgattttttaaaatttcaacttttattttcgattcaaggagtacatgtgcagatttgttacatgggtatattgtgtgatgctggggtttgatgtatgagtgatttcatcacccaggtagtgagcataatacccgatacttagttgttcagcccttgccctcctttctgcctccccatctagtagttcccagtgtctatttttcccatctttatgtccatgtgtacccaatggtgagctcccacttaaaagtgagaacatatggcatttggttttctgttcctatgttgattcacttaggataatggcttccagctgcatccatgttgctgcaaaagaaatgattttggtttttttatggttgtatactatttcatggtgtatatgtattgcattttcattatccaatccaccattgatggacacctaggttgattccgtgtttttgctattaggaatagttctatgatgaacatacaactgcatgtgtttttggtacaatgatttattttcctttgggtatatacctagtaatgggattgctgggtccaaatgggagttccatttttagctctttgagaaatctccaaagtgctttctacagtgactgaactagtttgcatttacaccagcggtgtataagcattcccttttctctgcagccttgccaatatttattattttttgacttctgaataatagtcattctgactggtgtgagatggtatctcattgtggttttgatttgcattgctctgaggttcagtgatgttgagcattttttcatgttggttggccgcttataggtcttgttttgagaagtgtttgttcatatcctttgcccgctttttaatggggctatttgttttttgcttgttgaatagtttaagttccttataaattctggatattagacctttgttgcatacatagtttgtgaagatttcctcccaatctttaggttgcctgcttactctgttgatattttcttttgctgtgcagaagttctttagtttaattagttctcatttgtcaatgtttgtttttgttacaattgcttttgaggacttagtcataaattatttgctaaggctgatgtccagaagggtatgtcctaggttttcttctaggatttttacagtttgaggtcttacatttattaataagtctaatccatcttgagttaatttttgcatatggtgataggtagaggtccagtttcattcttctgcgtatgaatagccagttatccccgtgtcatttattgaatagggagtcctttccccattgtttatttgtcctgtgttaatatggtatattacattggttgatttcagctattagacaaagcttgcattcctagaataaatcccacttacccatggtgtataatcctttttatatgtttctggatgccatttgctagtattttgttgaggatattgtatctatattcataagagatactggtctgtagttttcttgtgatctttatctggtttttgtatcaaggtaatactagcttctaagtgggcagtattcccacctcttctttttggaagagtttgtgagtgattggcattaattcttccttaaatgtttcatagaattcaccagtgaagccatctggctctgggcttgtctttgcgaatcatttgattacttagtctttttacttgttacaggcatgttcagttttttaatttcttcctagtcagttttgatcgtttgtgtcattctagcaatttgtccttttcatctatgttatctaatttgttggtctacagttgttcttagtatttctttataatctttcttacttttgtaaggtcagtagtgatgtcccctctcactcttgattttagaaatttgagtcttttttcttttttttcttggacattctaaaagtttgacaatttagtttcaaagaaccaatttttagttttgttgatttttctttattatctttccattctctatttcatttcttactgctctattctttattatttccttttatctgcttatgttgggttcagtttactcttttttccaattttttattttatttatttattttttttttttttgagatggagttttgctcttgttgcccaggctggagtgcaatggcgtgatctcggttcactgcaacctctgcctcccaggttcaagtgattctcctgcctcagcctcccaagtagctgggattacaggcatgagccaccacatccagcctttttccaatcttttaaagtggaagattatgttactgatttgagatcttttttctttttttaatataggcatctatagctataaatttttatctaagcactacttcatatgttttggtatgttgtattttcattttcactcatcttaaaagtattttctgacttctcctgtgatttcttctttgacctattggttaagattttgttgtttaattttctcatatttgtgacttgcccaaatttcttctgttgttaatttttaatttatttattttcccaaattactttattaatttatttctttcaataaatcctaaattttcttcaaagtaaagatactttgatcttaatccttttaaatctattaaggcttatattatggcctagcatcgagtctattgtggagaatgttccacatgtactatagaagaatgtaattctcttgttgttgggtggagtgttttatacatatctgtgaggtctagttggtttgagtgctgttcaagacttctctttccatgttgattttccacctagttgtttcatccattactgaaagtcgactattgaagtctcaatattattgttgaattgtctatgtctcccttcagttctgtccgtttttgcttcatgtagttttgagctctgttgttaggttctcatgtgtttataattgcttcatcttcttgatggactgttttatcattataaaatacccctctttgtctctggtaacaatttttgtcttaaagtccattttgtctgctattggtatgccactctagctctcaggcttgccgtttgcatggaatttcctttttgtctttttccttttaaactctttgtatttttgagactaaagtgtgtctcctattaacaacatatagttagatcttgttttgttgcttttatccagtttcacaatctctgccttttgattatttaatccattctcatatgatgttattattgatatgcctggatttacatctatcattttgccatgtgtgtgtgtgtgtgtgtgtgtgtgtgtgtgtgtgtacatgcacaaaaaatacaaagaggaacaaaacagtaattatatgtatgtgtgtgactgttttgttcctctgttcctcctttatttgaaaatttatttttgtaaatggtctgaggtagaggttgaagtctaggttgttagctaactatcctagcactctttttaaaaattgtcctcttctactgaattgcaatacctctgtattatatatattattcccatacatagtttgatatatttatgaatttttttttttgagacagagtctggctctattgcccaggctggagtgcaatggtgcaatctcagctcactgcaacctccgcctcctgggttcaagcaattctcctgcctcagcctcccaagtagctgggactacaggcacgtgccaccatgcccagctaatttttgtatttttagtagagacggggtttcacaattttggccaggatggtttcgatctcttgactttgtcatccacccgcctcggcctcccaaagtgttgggattacaggtgtgagccaccacacccggcctttgtttatgaaatttctattatgttctactcatgtatcagtcttctcttgtgtcaacatctgttgttttatctcagtgatttaatgataaatttcaatatctggtatagtaagttcctctttattttccttcttttcaaatgattgttcatgtgagttttgacattcaaaagaaaatactatttgtaatccttttaaaacttcatgaaatgcatgtgtgcatgcacacacacatacacatacatatacatatgcatatatttaccatctagtagcgatatgtgagaatctgggcaattcatttaaagtaaaaattcataaatagtaatattgcacattaaaatgaaacacaacaggatgatttatgttacttttacctaattattgttttctttgcagagtggatactatggaaaacagcgccatcaagatattaagagagagagtgatttcacgaaaaagtgaccttactcgtgctttccaacttcaagaccacagaaaatcaggtaacaaatttgcataacatttaccatttcttaacacaccaagttacatacagatcacttttcattttccttgcttccttaggatttcagttctccatttttactaagaaggaagaatagagataaaaataaaatataatccattatttgctcaaaaaaggcatatttctcccttttagcaagctattttcaacttggaaaactaacaacaaccctgaattaaacttttttttttttttttttgagacagagtcttgttctgttgcccaggctggagtgcagtggcgtgacctcagctcactatgacctccacctcctgggtttaagcaattctcctgcctcagcctcctaagtagctaggattataggcatacaccaccacgcccagctaatttttgtatttttagtagagatgggatttcaccatgttgttcaggctggtcttaaactcctgacctcatgatccgtccgccttggccttccaaagtgctgggattacaggcgtgagccacccggccctaaacctctattctgatagtatgctagactagatgttctggagggccttcttattaacaaacagctagattttggaggatgtagaatgttaatgcatttaccagcctcacagtaacgtgaatcttccagctgcatcttcactttccgtgaaagatgatttgaaaccacatgtgagagcatggagcaacaagaaagcacaaaagactagattttcctggggcccaatgctgatattggtatagcaatcaattctgagactaaattataatatagtaggaagatggaaaagctgaatttgagacttccatcatcatgcttggaccctcaaagtggctaaagttgtcctaagtctgtaatgctccctgactcctggcaagcaaatgcaaatttatctttgagggaagcatccctaattttggccactcacgtatccagagattaagatcaactcacatgagatcacaatcaaaaattaccaaacaaacaaggatacaaactaccatgagtgagagtcagcagaaacaacaattatttccccgaggacatcaaatattggaattagcaaataaatatgttcaaaggaaatatggaaccagaaacatgcatttgggaatgatttgaagaaaaaccaaagagatagaaaatatgcttgttaaaaaaagtaaaagcataatgaatgggttaaacggaagattagacgctactcaagaaagaattagtttaggagttataaacaggccaggcgcagtggctcatgcctgtaatcccagcaccttgggagattgaggcgggcagatcacatgaggtcaggagtttgaaaccagcctggccaacatggtgaaaccccacctctactaaaaatacaaaaaaaaacaaaaaattagccagccatggtggcaggcacctgtaatcccagttacttgggaggctgagacaggagaattgcttgaacccaggaggcagaggttgcagtgacccgagaccgcaccattgcactccagcctgggtgacaagagtgaaactctgtctcaaacaaacaaaaaaagagttatgaacaataaaatgagaagttgaacatacacctactcagagtactgggaggagagaatagaatgtaagagaccatatatttgacatggtaatggctaagacatttccagaattgataaaagactcaaattcataaagaggaacagtgattctcaagtagaataaatgaagttaaatccagacctacacacatttgttgtgaaactccagagcaccagtagcaaagaaaaaatctttaaaaagcaggcagagaggaaacacatattgctacaaagagataacgattagactgatagatttctcaacagttgcaaaattagaccatagaatcatatacaccaaacattggaaattaaatttagaaaaacatataccatgaaaacactaacaaaaacaaagctaagacagctttattagtatcaggcaaagtagactctaaggaagtatatattactagaaataaaaaaggacatttcataatgataaaatattaattatgccaattgaatccattctaaatgtgtatgtacttattcatatagcttcaaaactattcaaaacaaaaattgacagaataaaaagtagaagtagaaaaatctaccacgatagagggaggttttaatactcctctctcaggaactaaaagaacaaacagataaaagattagcagactctttttttttttttttgagatggagtcttgctctgtcgcccaggctggagtgcagtagcatgatctcggctcactgcaacctccgcctcccgggttcaagcaattctcctgcctcagcctcccgagtagctgggactacaggcgtgtgccaccacgcccagctaattttttgtatttttagtagaggtggggtttcactgtgttagccagaatggtgttggtctcctgacctcgtgatccacccgccttggcctcccaaagtgctgggattacaagcgtgagccaccgcgcctggccagcaaacttttttcttaaaagactacatagaactctgtacccaaatttcagaatgcatattcttatcaagcacaaatggaccatttacaaaaagtgaccacacactggaacataaagtgaatctcaataggttttgaagaattggaaacattacagaataaagtctctgacatatacaactccgtaacataagatagtaataaaatcaccctttggcttggaaatgagaaatatacttagaaataatccttggctccggccagacgtggtggctcatgcctgtaatcccagcattttgggaggccgaggagggtggatcacgaggtcaggagatggagaccatcctggctaacacagtgaaaccccgtctctactaaaaatacaaaaaattagccaggcgtggtggcgggcgcctgtagtcccagctactcgggaggctgaggcaggagaatggcatgaacccaggaggcgcagcttgcagtgagccgagattgcgccactgcactccagactgggagagagagcgagactctgtctcaaaaaaaaaaaaaaaaaagaaataatccttggctcaaagagaatcacaatggaaattagattgctgaaactgaatgacaatgaaaatacaatgtattagaatttatgggatgcaaattagagaggcattgatgataaccttaaatgtaaaagatatgattaacaaagtaaaaaaaaaaatttgtttttgttttgttttgttttgagatggagtctccctcagtcacccaggctggagtgcagtggcacgatcttggctcattgcaacctccgcctaccaggttaaagcaattcttctgcttcagcctccccaagtagctgggactacaggcatatgccaccacgcccagctaattatttttgtatttttagtggagacaaggtttcatcatgttagccaggctggtctgcaactcttggccttaggtgatccacctgccttggccccccaaagtgctgtgattacaggcatgagccactgtgcccggccaaaaaatggttctttgagggaactgttgaagttgacgaaaccatggcgagagagagagagagagagagagagagagagagagagagagagagaaaacaaataaccagtgcaagtgtagggaggagctgctgtctaaggctgagagagaggacccaaggaaggaaaaacttggaagggaccccctactcccaatcaagagatgagatcaagccctcattggtgaggatgtggctatggtccactggatagggcagaagttcactgaggtgcctcaagttacagttgggtctccggctggtgggccaggactggagaggatggagccacccactgaggtgccagcaagactctctttgggctgtgcaccaccgcgtctcccacacactaatggtgaggaagccatgggctgtggtgtcagtgaaatttactagaaggtgggtgccactacattttccacacatgctaaccgtgcggtgctgtagaaacaagaagcaaggcacaccagaaccagaaagaaaagctttttcttttgctgttctttgcagtgttcttcctgcactgtctactaacagagactaacgttatacgagctgccaaagaggaaatgattacagggtccagctctagtatcacaaaatgtgcaaaaaaaaaaaaaagactagttttggagctaagtaggaataaattgatagctggggtagccagcaattagcttttagataacaaaaatcttaaaagataccattcacaatagataatcaagtactgtgggagaaacctaatgaatgaggtatgagatttctttttttttttttgagacggagtcttgctctgtcgcccaggctggagtgcagtggcacgatcttggttcactgcaagctctgcctcctgggtccatgccattctcctgcctcagcctcccaagtagctgggactacaggcgcccgccaccatgcctggctaattttttgtatttttagtagagacgggggaggtatgagatttctaagatattattaagataaaggggactgaaataaatgggtgggtattactgtgttcaaggactataagggttgaagttgtcaagatacaaattcctcccaaattgagctatagtttcaatgcaatctcagtcaaaatcccaaggtggggatttttcagtagatcttgagaatctgtatctaaaagtcatgtggaattacaaaaggccccaaatagccaagatgttcctgaagaaaaagaacaaggtgggaagactttccctattatatatcaagatctattataaaagtacagtaattagaatggtatgcaattggcacaagaatacccatatagacaatggaagcaagtagagaatcctgaaacagattcatgcatatatagacacttgaaggtcccactgctgagcagtgggcaaaggagtcttttcaataaacgatgctgggccaaatggatatccctataaaaatagaaacagcctatatgtaataaagatatttgtgttttgaaaaattacatatattaggaggaaaagaatattagttgtgaaatgacaggtgaataatacatcttttattctttgtattcttttgtgtttttcaaatcttctataataagcaaacctaggccgcgcatggtggctcacacctgtaatcccagcactttgggaggctgaggtgggcagatgacttgaggtcaggagttcaagaccagcctggccaacatggtgaaactctatctctactaaaagtacaaaaaaattagccgggtatggtggcgtacacctgtaatcccagatacttgggaggctgaggcaggagaatcacttgaacccaggaggcggaggttgcagtgagctcagatggcaccactgcactccagcctgggtgaaaagagccagactccttctcaaaaaaaaaaataaataaataaataagtaagcataccttactttgttaatcaaaaaaaaggaaaaaaaaaatctaacacgtgaagtctgatttcttacaggtgacaggaaggacacgatctgtggaacactgaagatatccttgagttagttctccttcagggctgcagggcctgggaggataaattatgagggagagcagctggccccatgctgccctggctctcccaaggaggttgcattctttaaaatcatattttaacaaatcatttgggctttgttattgttgttgttaggaaaactttctgtgagccagtgggctttttgcatggagaacattttggggctgaacttaccatggagatccctcagttcgaatctggtaaacatagaccaaaatggaaacgttgaatacatgtccagcttccagaatatccgcattgaaaaacctgtacaagaggcaagtgaaacatagccccagctaaaacctagccagggtgaaacataacttagtcctttgaaaagctgggagtggccgggcacagtggctcacgcctgtaatcccagcactttcggaggccaaggcgggcagatcccgaggtcaggagttcgagaccagcctgaccaacatggtgaagccccgtctctaccaaaaatacaaaaatcagccgggtgtggtcgtgcccacctgtaatcccagctactcaagaggctgaggcaggagaattgcttgaacccaggaggcggaggttgcagcgagccaggatcgcaccattgcactccagcctgggtgacagagcgagactccatctcaaaaaaagagaagctgggagtgggataatctaatagatggagtggcagtcttaggaaaagccgaaggggaatctcccaggtacactgtggtctgttcagcaaatttgtgtgttcccaggataagcaaaaagaaaaaagaaaaagcttccacaagcaagtccacatcaaatactggatttttttttgtaagtgctgtctagcagaaggggagatatgacatccatgctttttgtttgttttttgaggtggagtctcgctctgttgcccaggctggagtgcagtggtgcagtctcggctcactgcaacctctgcctgccacgctcaagtgactctcctgtctcagcttcccaagtagctgagattacaggcgcctgccaccatacccagctaatttttatatttttagtggagatggggtttcaccatgttgaccaggctggtcttgaactcttgacctcaagtgatctgcccacctcggcctcccaaagtgctgggattacaggcatgagcccctgtgcctggcctgacatccatgcttttatacaacataccatttctaatacttaatgtattgcttgttaagcctgagtgtacagacttgctgacatgacccagaatatgtctgaaagagttttgaaatgtagaaatcttttcttagaatgtgaatatcagggagatttatcagatccccatacttattagttaacaattcatcagcagttaaatatgacattgagctgaaaaggagctggttggagctaggacttgggtgatcatttgcagtgaagatgagacgttaagagcagagagaagggaagtaaaggtaggttagagactaaagtatccccaggaaggaggcttttgacgtcacttcagaggcagtttaccatggtgactaagatcacaggccttggcttcaggcagccgagatttaaatcccactcaccagctctgtgacccttgggaaagttcctttatctccctgttttcaaatttgtaaaatggacataataatagttctgttcttgttcattcttgttgtagaggaccgaatgaaataatccacataaagttctctgtaaatggtggctgtgttagttactgctgccttattcattttggccctgtcccctgaggatcacagactgaatgaagagggtggggcctccaagggaagtctggccttctcagatttctgtctaaatcacatcatttcaattgttgatgatgttttctgtttgttacatttgctaaaagcgatcagtgtcatgaattcaatatgttctaacacttagaaaatctttattttaggctcattctactctagttgaaactctgtacagatacagatctgacctggaaatcatatttaatgccattgacactgatcactcaggtaaataaatgaacttggatgagtccatttaaaaagtgtatgtgtgtgtgtatgttggggatacaaaatgagtacactttgattgagccctataattaatatggtttgacaccttcattggtaagatggaggccttgcttatgcatactgttaaatgaaaattgtaggagcccattgttttggactaagctccttcaccaggccccaacagactagactaaaagtcaaaatggggtagcagtagtagaaagcaaaggctaatctggttctctgaaatcagaactctgattttatctattttgttcttcatctaacatgatgaaacttgaggggaaaaagaaactcatttaatattattgttatttcagtttggctgcagactctgtattcaagaccatagagtcctacagaagcctaggtagccatcagtcaaactgaaataactttttataaatcaccagcacaaatgaaaagatgatttactatccatttcagtatcttagttactcatggccataaaaatcattcctagaaatctgattctgttttggggagtaagggctatgaaaagtcattttctgcttttttttttttttttttttttttttttgcgacagagttttgctcttgttgcccaggctggagtgcaatggcgggatctcagctcaccacaacctctgcctcccgggttcaagcaattctcctgcctcagcctcctgagtagctgggattacaggcatgcgccaccacaccctgataatttttatttttagtagagatggggttctccatgttggtcaggctggtctcgaactcccgacctcagatgacctgcccacctcagcctcccaaagtgctgggattacaggcgtgagccactgcgcccggccttctgcctttagctttgatgcacaattacttattttcaaatttttaaaaactcatcagataatcccctaatgcagagacctttgaacaccgaaaaaaaaaaaaaatcaatgatcaacacattaaagtaaatgattgcctgtgaaaaaggcagcaccattgtttgtaatcctcttattgactcccaccgtatcttctccctctgctttgatgtcatcctcctctctgccctccttccatgcacctcacctttctattttaggtcttgtaatttctataccacatttagtcccatagtccacaaccccgtccccatttcttcactgtttgctcattctggctttagaataagttcaggatcccttggtagttgaaagtgagatattgtttcttacatttatgatcttactcttccatatccttcagtatcttcatgattaggcagtttagtgagtttctaactggggctatttaatcagtgtgggttccccaacccttgccttaggtgggtcttaaaatgaacactcacaaccttctcctatattcttttaggcctgatctccgtggaagaatttcgtgccatgtggaaactttttagttctcactacaatgttcacattgatgattcccaagtcaataagcttgccaacataatggacttgaacaaagatggaagcattgactttaatgagtttttaaaggctttctatgtagtgcatagatatgaagacttgatgaaacctgatgtcaccaaccttggctaaacacaaatgagagcttccctcaggctccctgaaacagctaggcccaaatcacaagtacagtcctttccaacacccctgaaattcatagtcagtagcagagaaaagcagatcccaattcatcccacaaacagatgcatagtatgggttttggaagtccctagcaagctgttattggtaagattaggttaaatgtcagtaataggatttggtttcagcattagtacctacatattgccagtgagaaactgggttggacctagtggtgttgtcgtgagtgccacctaaccaggaggccagagcggtttgaaaacatcctgaaaggaactcatacagcacaagagaaaactactaagcttgacatctgtgagtgactgagggagacaggaggaataccaggttattcatggaataaagtctttccatctttaaactgtgatcttctttggagattttataagccagtgatcctcaattaagggatccacccttcagggatgagaaccatattggattcttggggggaatctgtgggagtgtattgtttgaaaaagcgtatttgtgtgtgtgtgtatgttggagatacaaagtgaatacacttggattgagccctataattaatatggtttgacaccttcattggtaagatggggccttgcttatgcatactgttaaatgaaaattgtaggagcccattgttttggactaagctccttcaccaggccccaacagactagactaaaagtcaaaatggggtcacccatgctgaggtcctgtgtcatctccggccagcttcaattggcataataatgaagttccctctgccttacaacaaaaataacctgatgttaaccaatcaattatttgtttattgttatttccctgctgtcttacaaggaaggtaactttgaaacaaccagtctgctttttgtcctttggttctgctttcttcagtttttctctgtctataaaaccaacctcctctgctcagcttatcagaacactttatttttacagaaggaagtgttgcctgattctagaatcacaaacaaagccagttaagatctttaaatgttatcttttgaccaatctggtgaccataaaagggaccataaggagactactaattactcttaagggcctcttgaggaatgcaggagacgtgctgctgacccctttcaggtcccctgtcttcctcacagagtcctaggtgttgtaaataagttccttttgtgccagactctgctgtttttgcattgagacccctgaattttttggccttcaaatccaaggtaaatgccaagagtgagcatttgactttggagtactgctatgatttgaatatggtgtgtcccctctgaaactcatgttaaaattttattgccattttggccattttgggaggtggggtctttaagagggattagtgcctttctcatgggagtaagttagcaattaaagaagttcagcccccttttctctggtgtgtgagtgctctctctcccctgctcctttcacttttccaccatgctataaaacagcatgagggcctcactggatgcagccacccaatcttggacttcccagcctccagaaccatgagctaaataaacctccattctttataaattacccagttgcaggttttctgttatagcaacacaaaacagactaaaacaaataccaagggtttgtgccataagaggacacatggcttttgggtttgcagtggatgatgagtcaccggcaggggctgcagtttcaaaggtaactgacagtagttgcagtaactgactgttactgtaggagtgagcctggctttcagaattcacagctatctatccactttatttcttctcttcttgtgtgctgaggtaagaaaaatcattagctaagttaaagggatttcagagccaaaaccaactttgctctgagagacccaagttccaacataaaaataggatccttaatttctaaagaactgagtactcttggctttaggctgcccctttgttagtggttctttccctcccatggacagctataggtttcctatttgtcatgtttttgtgttctgagaacttggtcaaccaaccaaaaggttgggagttgccaagaatatggctagacagaaatgtgggttgcaccttatttgtgactagcatactgactgttatgtctaaatctttctttcttttggctgtctttggtattctggattttgatctagaaagattaataagaaacataatggacaccccaagttctaatgcatgcaaatatagtccccctttagggactccagacagctatgtattcaaacattatggtccattcttgtgcacgtttttaaacctatgggcagattataccaaagacttggccaggcacggtggttcacgcctgtaatcccagcactgtgggaggccgagacaggtggatcacttgaggttaagagtttgagaccagcctgaccaacatggtgaaaccctgtctctactaaaaatacaaaattagcccaacatggtggtgcacacctgtaatcccaggtactcgggaggctgaggcaggagaatcacttgaacccaggaggcagaggttgcagtgagccaaggtcacaccattgcactccagcctgggcaacaagagtgaaactccatctcaaaaaaaacaaaaacaaaaaaagattataccaaggaccatttggagttccagtggtctttatgtggactgttcaagcctcccaaggttgtttttattcttttattttttttatttttattttttgagagggagtctcgccctgtctcccaggctggagtgcaatggtgcaatctcggctcactgcaacctctgcctcccgggttcaagcaattctcctgcctcagcttcccgagtagctaggattacaggcgcgcaccaccacgcctggctgatttgcatctttagtagagacggagtttcaccatgttggccaggctggtctcgaactcctgacctcgtgatccactcgcctcagcctcccaaactgctgggattacaggcgtgagccaccacgcccaacctctttttattcttagaactaaattagcagactgtagctatagggttaaagtctgaatgggatgtatataattgattagcatgtagaggcttctaagctctctttctctctgtcctcccctgcctacttagaatctgctgacatttttgcttggttacctgcccaggattccaaaatagcctttttaaaagcttcattgcaaagagctaatgaaaggctagaaatggaagatatcccccacaccaaggatggtaaaactgatgtaactcctactgctcctctctatcctactttgcctgaatatttagtctattaatactctgtctgaattgcccttcttctgtgaaaaaaaaaaaaaaaaaaaaaaaaaaaaaaaacagttaaacagtttccttgtagcataaaaccatctgaaaattcaggagacaatcctggagtgatttacattgcctggataaaaacagctcagggccataggttaaaaattttgcaaacccagggaagacctttaatctgaagaattcacagtgtgttttttttttttttgagacgtagtcttgctcttgtcactcaggctagagtgcagtggcgcagtctcggctcacggcaacctccgcctcccaggttcaagcaattctcctgactcaacctcctaagtagctgggattacaggcacccaccaccatgcccggccaatttttgtacttttagtagagacagggttttgccatttagaccaagctagtctcgaactcctgacctcaaatgatttgcccacctcagcctcccaaagtgctgagattacaggcgtgagccaccatgcccagccagaattcacagtcttaattataacttaagatcccgggatgggggccgggcgcggggctcaagcctgtaatcccagcactttgggaggccgaggcgggtggatcacgaggtcaggagatcgagaccatcctggctaacatggtgaaacccgtctgtactaaaaatacaaaaaaaaaaaaaaaaaaaaaagccgggtgtggtggcgggcgcctgtagtcccagcaactcaggaggctgaggcaggagaatggcgtgaacccgggaggcagagcttgcagtgagccaagatggcgccactgcactccatcctgggcgacagagcaagactctgtctcaaaaaaaaaaaaaaaaaaacaaaagatgccgggatacctgatctacaccaactaatttacatgttggtgggatctggaaagcccaaaaatagatgaaagaggcagaatggtattttcctaagagttatattagtgacctgacaagccccacctggtccatttacgggtcagacaaaccctgaaagattgcaaatgaccttaggaaagctatttccaaagtatttcagctctatggcaaccaacaacctagaatgacttgtgggcctgccccagggcattccaataagcaacccctaaaactgcggtttcgaaaaactagttgtcatttgtgcaaatgatcaaaacattgaaaaagggactgctcccaaagaacttgagagaagcccttaaaaacaagctgcctacctctgatcatctctatgttaaccaccaagactgacaggcctccgaagacagctctggtaagtttctactggttagtttttgccctgtttgttaaaaagctctgccctgaaggcaatgatctaagtaaggaacaggattttgaaattctttctaagagaaatttatatctgtaaaggaaatctccatttgtaaggctatctccctctctgcacctaaaccattagaaacttttacaatgagaaaggcactggcttaaaagcttgcatatcaacgtttacctttgtttaagttgcttttcctgtccatctttttttttttctgagatggagtcttgctcagtcgcccaggctggagtgcggtggcgtgatcttggctcactgcaagctctgcctcccgggttggttcaccccattgtcctgcctcagcctccccagtagctgggactacaggtgccggccaccatgcccggctaattgtttttgtatttttagtaaagacggggtttcacagtattagccaggatagtctcgatctcctgacctcgtgttccgcccacctcggactcccaaagtgctgggattacaggagtgagccaccgcgcccgaccgggcaaatgaatcttaatgaaagcaataagatctgcttctttctgtgtgtatgtttgtatatctatgtgttatgtgtatctgatattttcataccaaaatatataaaagagctctatttaattggcttaaagaaaaagtgtttaaagtcattaattataaagcaagcatatttttcccctaaatttactagtcaaacaagcttattacctcttagatgtataataaagctataaagccaaccaaagagcaaaatacatgaaaaaaaaaaaaatcttgatacctatcagtcatggtgatacagaagggctgggctcctggctaaacccaacccataagcctggaaccttggccctaagtgaaaacagctgaccccgtttttttccagccaaatgttgccgtttttggcctgccctgcccctatcctttgccgatgaaagacttcagctggcagagcaacacaagtggctgaatgtcaaggatacaagcagctgagtggtgagcagagaagcagtgcgcgtcagagactatggatagacacggctaacttcaggcggtgcggcttcggagaggagcccagccagagacggccgggcttcagggaaagatcaccctcccatcccctttccagcctccctttctgctgagagccacccaccgctcaataaagtctgcattcatcacctttctaacagttcatcggacatgaacccaggttctgagagggcagggtttgccaccctgaccctccactgacctggttggcacttggccatccccggatggcagaactgaaagagcattggtcgtaacatgcttggacgctgctgcagggcccacaagagcctgctcccaccagagaagagtgaccagtcggtcccaggattcatttgctctggttcctgcactcactcgcttgcacgctccctcctgccaagagtagccagtgcgggctgagtggaatgagctactccagtttccgcccacgaaggagttcaagagaactaacccgtcccaataggaaagggaaaaaaagcagagtggaagaaccatgtttaacctattaatctttttgcttctgtaatacttatagtttcctgatttttttgaaaaataacttgaggtgatggctagctttgcttaatgaacaactcaagcataattgttaaaaatgagtaaattaggtgtatgtaaatggtatacaaattgataaatgaacttttcagttttgaaaaccttttaccgtaacttaaagtcctgttatgattaagtaatattcatgaactgtctgagtcatttccaattaagttagaatactgaaacattaatttgaacgtaactttaaatttatttttggcttcttaaattttatagaaagactaaatatggctgggtgcagtggctcatgcctgtaatcccagcactttgggaggccgaggtgggcggatcacgaggtcaggagttccagatcagcctggacaacatggtgaaaccccgtctctactaaaaatacaaaaatttgctgggcgcggtggtgggcttctgtaatcccagctactcagaggctgaggcaggagaattgcttgaacccaggaggtggaggttgcagtgagatcgcgccactgcactccagcctgggtgacagagcaagactctgtctcaaaaaataagataaaataaagactgaatatattttagtctatttaaagaaaagctatggaaaaataaatatattttggtctgttaatatgaaaaattgtactttgagaaagtgcatatttctagaaattatgaaacttaatttatagaatactgattcacaattgctaaggattaaaaattccaataataaaactactataaaggaattctgtatgcaaactaaagaaagtaagatgtgttttggtgaggaaaaaatagaaggatacttttttcttaaaaagaataattttgtctaatttggaggttatttaaaagttgtttcaaaataaggattttggaaggaaatagaaatgaggtagggaggaaccagtaagagggatgtcaagaaagttacaagtatgaaaacgtatgtttggcttaaaaaaaagttgaaaagagaaaaagtaattttttttttgtatgaggaagaatttgtgttgtcaaaatgataagggaaaaaggaaagtaaatttttgtcataaagtagaatgattggttgttccaatatgaaaaagaaggaagtatagaacaaaactgaaggtttaagcaagttgtacaagatttgagcaagttctaagagatctgagcaagttgtaggtgtgtaggagatgaatcctatgaaaagaattttgtaggccaggcgaggtggctcacacttgtaatcccagcactttgggaggccgaggtggacggatcacttgaggtcaggagttcgagaccagcctggccaacatggcagaaccacgtctctgctaaaaataaaaaaattagctgggtgtggtggtgcatgcctgtaatcccagctactcgggaggctgaggcaggagaatcacttgaacccgggaggcagaggctgcagtgagccgcaactgcgccattgcactccagcctgggtgacacagcaagaccctgtctcaaaaaaaaagaattttgtatgtgatcaagttggcaaaaattggaagggaattatttatagggttttctaaaaattaagctttgagatcaaaagtacactaatacaaaactaaaatttagtcccctatgttaaaacaaggttttcttagagtattcatcttttttttttttccggagacctttttttgtattaaatgtgtaaacagtagtcctcattttacaaattcaaaatcagacaaatgtatgagggtgtataattggtatatttataaactgtatcacccaaaaaaccactgcgatcacaatctatattacattcaacgtttgcgtatttacatgatacttactgcaaagtaaatacaaaatgaactcccatcatcttagttcagaacacaggtgatataatttcagaacaaaggcagttttttcaacaacaacaacaacaaaaaaacagaagtctcccaagtaccaattcgctattttgtggaaaaatacagaaagactaattatgagttccattcaggtttagtcagtaagatatgttgtttgttttttttagagacagggtctcactctgtcatctgggctggagtgcagtggtgcaattatagctcactgcagcctcgaactcctgggctcaatgagtcctcccacctcagcctcctaaagcactgggattacatacatgagataccacactcagtctagtaagatatgtttttgttattgaaatacagctaaagttatagattttaatcaccaagataacagtacttctggtttataatcgaccttaagatagtggatactaatatatatacattttgacatttttttaaaaagtcttcaaaacttaatacaattctgaaagtatatgtaccttgccatccgttcaataaacatgatttatttttatacaggtcacaaaatttcaattaactagaattctatatctattgcctgcctgctaggtttcagtcttaagtctgactatatcaaaaacagcagttcagaatttatttcataaaattaatcccaaaagttactgggtagcttttaaagtattttattgtttataatacaactcactagatagtctataccggtggctcctgacatcagaattatctggggagctctttaaaaaatacatgggatccacatcatagctaattacactaaaagaattgagaatgtctgtattttttaatgttcccaggtgataatgctgtgcagcctagtgtgggaaaccctgacctaccactgagcctgtggttctcaatttttcaggtgcattggaatcactgggggaaactttaaaaactaaaagcaaggcaaaacaaaaaaccagatgtgcttcagtagattgagagtagtgtgcaggaaccagcatctgaaacaaccattgcagttggtccaaaatgacccagaaacactgcaccccctctgtcagatatcacattacaatgagtacattcagcaatttaggtgacattgtcctgcaagccctaatgaatcctgccctaggcagttttagcaagtgtttgagggcaccactcagccttttcaaagaaaatatatttatactcttaaatattaggtcaaagtcaactgaattgtgagatcatcattcattaaagaagacaaatgccctttcaaacaatttaaacttttttttttttttttttgagacagagtcttgctctgtcacccaggccggacgccaatggtgccgtttcagctcactgcaacctccgcctcccgggttcaagcaattcttctgcctcagcctcccaagtagctgggactacaggtgcgtgccaccacacctggctaatttttgtatttttggtagagatagggtttcactatgttggccaggctagtttcgaactcctgacctcatgatctgcccacctcggcctcccaaagtgctgggattacaggcatgagccaccgtgcctggccacaatttaaacttttaaacaaaccagttcttagccctgaacttaaatccaatgctttctccatcattagcctgatacgtgatcagaggtagtgattccagcttaccaaaaatataatgtggattatggaagatacacattcatacacttttacaggctctgcacagtccctatgtaatagagattggagaccagttggatattaaataatactgtaaaacagtaaataatacactcttgattttaaacaatgaaacctcataatattttcctcacatagtaagtttctacatatagtatccagaaaaaaatctagaaaacactaaaggtatcatgctacctctttgtgaaactatttactaatttttcaccatctctatcattataaagtgggtcgttgctatacatcattccacttcaagaatttttttttttttttttttgagacggagtttcgctcttgttgcctaggctggagtgcagtggcgccatcttggctcactgcaacctctacctcctgggttcaagcaattctcctgcctcagcctcccgagtagctgggattacaggcatgtgccaccacaccgagctaattttgtatttttagtagaaacagggttttaccatgttggtcaggctggtctcgaactcctcacctcaagggatccacctgcctcggcctcccaaagtgctgggattacaggcgtgagccactgcgcccggcctagatgtaatctttgaacccaaaagcttcaaaagcagtgacaacgacactggttagtagaatctatctggcatcttgctcacctgaactacacctgaactgctgttatttcctgtgcgtgcacttttccattatgttcttcacaaggctcacctcttttccaggggtagatgtgattaaacagctggcatttcttcttaactaagcaatgaaaagacaattactaaaaatcagcattgtattgccagaaacgcaagccagttcataaaataagaactggaaagttttaaatctatattcattaagaagctaaaaaattcatttgaatttttaaccacttagagtctagactcataataaaccattttccagtttataaatgattcaaggtcaaaatagtacattttaaaattaaataaaatttgaaaaacttacatataaatatcaaaaacaaagcagtatgatgtctactatttaggaagaaaggcatggagacacagtaatcctggaataaggatttcaagatctgacataacggtataagccactacctcaacttcagtctacacttaagccatcttaatccaaatataggataggagaagaaaacacacaaacacaaattgtcacgtccttttagctggtctggcagttaactaattttctctttcaaactcctctcattgctgctctttttccaactcttttttgcctcctttgctgcagtttaagtcctttttttttttttttttttttttttttgagacagggtcttgctctgtcacccaggctggagtgcagtggcacgatctcggctcactacaacctccgcctcccgggttcaagagattctcctacctcagcctcccaagtagctgggactacaggcttgcaccaccacgcttagctaatttttgtatttttattagagatggggtttcaccatattgtccaggctggtctcgaactcctgacctgaagtgatccgcccacctcagcctcccaaagtgctgagattacaagcctgagctaccatgcctggcctgtgctctttttttaaaaatttgatgtttttttcatgaagcatcagcatctcttttcttatattcaccaactcggcaggatagtatttagcctcagcaaacaaagcattaatatccaacatagaatgacagtctttaaattttgaaatctcttgttccagtgtgtctgacaatacaacctggttctgtgtgagctcctggagggtttgttttgatctgtgcagatctggcagttgctccacagccttgttttatagtcaagtcctctattaacccttcatctagagaagtgtcacttaaacccagcgtgggctcccgggattccaggctgttgggtggccttatcagggccccgtccaaggacaatggcccaaggacactcgtgtccctccagctaggaacagggaaggggcctcatctgctttttttttttttttttttttgagacagagtttcactcttgtgccccaggctggagtgcaatggcataatctccactcactgcaacctccacctcccaggttcaagcaattctcctgcctcagcctcctgagtagctgggattacgggtgtgtgccaccatgccaggttaatttttgtatttttaatagagattgggtttcaccatgttggttaggctggtctcgaactcctgacctcatgatccgcccacctcggcttcccaaagtgatgggattacaggcatgagccaccgtggccagccctgtttttcagatttaagaacacttttttcttttaagctacctatagtttacaacaatttgataaagtttatttttgtaaacaaaaattgaaggccaaggtgggtggatcacctgaggtcaggagtttgagaccagcctggccaacatggcgaaaccctgtctctactaaaatacaaaaattagctgggcgtggtggcacatgcctgtagtcccagctactcgggaggctgaggcaggagaatcgcttgaacccaggaggcagaggttgcagtgagccaagatcacgccactgcactccagcctgcgtgacagagtaagactccgtttaaaaaaaaaaaaaaaaaattgaaacatttgctttttcttcctaccttatcctccagaatttggaaactattcatgagtattcttatttttatggcaatctggttattcacataagttcaataagcatttgcttgctttataacaggatacaattgacaacactggttaaaatactaaggctttgactggactgtcatatttgagaatgcgcataaaatgcctgctttcaagggttcccagccttacagtgtggaaaaaaagtcactctcaagatattagatactgcaggcaaagtctgatgtctgccttagtttggctttttattattgagtggttttaattttaattttaattttattttatttttgagacagtctcgctctgtcgcccaggctggagagcagtggcacaatctcggctcaccgcaacctccgtctcccgggttcaagcaattctcctgtctcagcctcctgagtagctgggactacaggcacgtgccaccacgcccggctaatttttgtattttttagtagagatggggtttcacaatgttggccaggttagtctcaaactcctgacctcaggtgatccacccacctcggcctcccaaagtgctgggattacaggcgtgagccaccgcgcccggtctattattgagaggttttaaaaagtccagtgtgggactccttacaaaatttccaaccaagcagcttttaaaagaacctaagtgattattcttgctgcgtttatgtaaaacaaccaggccaagtttaatgagagtaaacttattttgcaaacaaattagtttacctctgattagtaggaatgagagtgactgtagagagaaaaattgtgtttcagaagaacaaatgtagtaccccgttactagatcatagccctgttcactgtgtttgagtttttattatctacttgtagactggacttgtttctgaattctagtttcctccaataactggctataaaactccaactaagaacaaaaactgctctgttcctaaagccctataagctgaagctgaacaactcattgtaaatttgggaagggacaagtctcatgcctgatgtgtgggccacacaaagagttcaccagaatgcccaatgttacaaccagaaacattgaaactgcaaaccaggatgcgaagctgccaacttcacactgtggacagctttcccgagacaatcggaagaagcctccctatcctaagactcttactcctctgaatttttctttgcttattcttacctctttcacttggcagaatgatgccgtagttagaatttcagtcagtagcttttgcaggtcacttgcaaatggtcactctttgctttaatttcacccagtcatgggatggcggataataaaattgctgcctactgccatctgtacagttgctaacacttcttgttgctcagggataaatccatcaggtattggagactcagttgcaaaaattaacaggctacttggttatgatggtagacccctcatctggctccttctttgatctacttaattttagttgggttggtttatgggaaccttggctaagaaccatactccaaattctaggtattatcctcctgatagttacaatagtagtctccgtagtgcactgtatcctctcaaaaagttttaaatgtttgaacacagccatttgtcaagcatgaaatggtctctcatctgctggaatgacagaaactcagagaagtgtgtgatcatgaagataccatcacctgtgattgatatattgagactagaaacccagatgatggtaactgagagcagcgctgatgccctaagttttggtggcactctcacctaggggagagcctgatcaaaagaggagaaaggtgttaaacaaaaatctggaggaggccattgttttcaactaagcaacaaacagaccagactaaaaatcaaagtggagtcactcatgctgaagtgccacatcaccaaaccaaaaatgagttgttagctggccttccaaaaaatcaggatagtgaaacagcctcatttcccaaatgggccaatttccacccaagtgataatgaagttccctctgcctttaatccttaaaacaaaaagtaatctgaaactggccgggcacggtggctcatgcctgtaatcccagcattttgggaggccgaggccggtggatcacttgaggtcaggagtttgagaccagcctgggcaacacatggtgaaaccccatctctactaaaaatacaaagttagccaggcatggtggcaggcactgtaatcccagctactcaggaggctgaggcaggagaatcacttgaacccaggaggcggaggttgcagtgagctgagttcatgccactgtactccagcctgggcaaaactccgtccccccgccaaacaaaaaaacaggaaaaaaaaaagtaaggaaaagaaaatgtaatctgaagtaacctggtgttaaccaatcaattccaatcagttatttgtctagtgttctgtttctctgtttctaccttacaaggaaagtaacttggaggagaccaatctgctttcactctttggttccgctttgctttcttcagcttttctctgtccataccaacctcctctgctcaactcattggaacacttactctaattttatggaatgaagtgttgcctgattctagaatcacaaagccaagtaagatctttaaattgtaatgttgccgtgagccaccacgcccggccccatggactattttctatggaaaaatataactcaagaacaaaaggagtgtctgaagagacatataaccattaaagaaagtgatggctttgtaattgtgtcagtttggctaggctgaactacctttctcagaattccctctcttgtatgtttctggttagggtgggccaggagatttgggaggtaaaaggaaaggagttgctattttgcagcttacacatgctgtggctgatctgcagattcacctcattggtgtgaaacagtagctaggcctgcaattgctctacctacccctggatcctatcagcttctctgatttctgggctgtgtacatgtgtttagctccatgaccgaaagccttggcttctgcagggcaactcgatgaccaaggtcagagatggtaagaaaggacacaggcttcagttcatttttgtggggtgccagcttgtgcttgtgggttttagcctgctcgtgatcttccttcctgactacctgccctgtagactttgagctccagcatcagatatggagaccacatctggtttctactggttatctacctataaatcatcaatcacctatctgcctacctacctatctgtatcttcttctggttctgcctctggttgaacccagactgacacagaatttggtactgagagtagttccagaagaacagaatcttaaagataagtgctctgaattggttctgggttttctgaaattggttccctactctgatttgatttaaaggtacgagtagccctgtttccagtgctaaagaggtacttgtactccacagtgtgaagtggcaaaatagttactcaaattatcaccttcagatacttgcgatcaagtacctatagaaggcaaacctctaggagaacaagtatttgctacttttaacattttagtcaaaaggatgagtataatagggttggttggttggttgtttactgaagaacttgggtaaagaaagtgatcagctcaaggtctacataaaggacctgaatgtttctaaaactaccaggaaagaaactcttatctcctatagccacaaggcttagatttctgaaagccaaacccgaagtctaatcctgtgaatgcttgaatgacaatacaaattgaactcccaacctcttagggtatgttgctgaaaggacaatgattgggaaggaatggcagcctgaaaattggaatggagaccggttagaaatgcttgttccccggtgccgtaaacaaccagcacttgaacataaatttaatttcctcagcaaggccattttttcactttctgcagaaagggtacactcgccagcaattttgctgtaagagtacaccgaacagaggagacagggtcatttaacctgacgtgtccaccctactgctgtgtctggtttccattggctggaatgggacctcaaattctgtatttgtcctgactggctagcaacttaaacttttttgtgtgtgtgtttttttttttgtttttgagacggagtctcgctctgtaacccaggctggagtgcagtggcacaatcttggcttaccccagtctccgcctcctgggttcaagtgattctcctgcctcagcctcccgagtagctgggactacaggcgcatgccaccatacgtggctaatttttttgtatttttagtagagacagggtttcactgtgttagccagaatggtctcaatctcctgaccttgtgatctgcccgcctcagcctcccaaagtgctgggattacaggcgcgagccacaacgcccggcctgcaacttagaactttctaaaagagggaaaggcagaggagaacaaaggaaggaggaagtaacttgtggaatgctgagaaaggtaaaaacaccttcaaataaggaagaggaacaggatatgacctaatgcttgcttgggccagtataagcatgccagggcaaatatttaggctaaattgtggaagctaagaacataaagtacattgatttctttattacggctagcagatatttaagaatgttagcacaggtctttgaataaattttgcttctaagagaagttactatttattcctaattagatggggaggaaagtctttgaagaggaacctctagtttactgtttccaggacccaccagcagattttgattcttattttcctttcctggagaagcagccctgccatccctgcctgaggagggtacttttccccttttggggcctggaggacctgtaatggcctcccctgaattagttgccttacaaggcactactgatccttctcaagtcctacccccaccacctctctctatttggatgtgcttctatgagcctatatggaagatcagaagtgctcgaaggactcaagagcattgaaatggtaaatgtgtgagtaaaatctaaatgaataataacctcttataagagttaaaataagagtaaaattacagagactaaatgataacaatagttagtacataagttgatgagagaataaatggagttaaagggttctaaggtctttttattgtctaaaaacacggtcaaagcaacaattaacattagattgtgatgtcaagaatgcatgttgtaatctctagaataactggtttaaaaaaatagtaaaggtatataatttccaatctatagagagatggaataataacaattttaaaaagaagtcaaaagggaaaaagaatatagaagagataagccaaacagtaatatggtagatttaaatccaaatattcagtataaattgattaattatccctgtcacggaaactatcacctttgatggtttaggaccacttccaactaaacaaactcaggcctctggaggaaggcctagtcatcccaattaaattcatcataaagtagccagccccagctaacccaccagccaactgaagatgcatgaatgagttcagctgagattacctgaacccatccaggccagaagaactgcacagttgaagctagcccaaattgctgatgtacaaagttatggtcttatgaacccccaaaatttgagacaggtctcagttaatttagaaagtttattttgccgagattgagggcacgtgcccatgacacacccccaggaggtcctgatgacatgtgcccaaggtggtcagagcacagcttggttttacacattttagggagacatgagacatcgatcaacacatgtaagatgaatattggtttggtccagaaaggggacaactcgaagagaggagggggcttctacatcacaggtaggctagagacaaacgattgcattcttttgagtttctgatcagcctttccaaaggaggcaatcacatatgcatttatttcagtgagcagagggatgactttgaatagaatgggaggcacgttttccctaagcagttcctagcttagtgattttggggacccaagatacttccctttcacagtccaaataagtgattgctgggttttttgttgttgttgttagtttgtttgttttgagatggagtttcgctcttgttgcctaggctgtagtacaatggcgtgatcttggctcaccacaacctccgcccccccagttcaagcgattctcctgcctcagcctcccgagtagctgggactacaggcatgcgccaccacgcctgaaggggtggcctgcccctccgcacctgtgggcgtttctcgtcgggtggggcgagagactgagaaaagaaagagacacagagacaaagtatagagaaagaaaagtgggcccaggggaccggtgctcagcatacggaggacccgcacaggcaccagtctctgagttccctcagtatttattgatcattatctctaccatctcggagagggggatgtggcaggacaatagggtaatagtggggagagggtcagcaggaaaacatgtgaacaaatgtctctgtgtcataaacaaagttagaaaatgtgctgtgctttgatgtgcacatacataaacatatctggtgcattaaagagcggtattgccgccagcatgtctcacctccagccttaaggcggttttctcctgtctcagtagatggaacatacaatcgggttttacaccgagacattccattgcccagggacgagcaggagacagatgccttcctcttatctcaactgcaaagaggccttcctcttttactaatccttctcagcacagaccctttacgggtgtcaggctggtggacggtcaggtctttcccttcccacgaggccatatttcagactatcacatggggagaaaccttggacaatacctggctttcctaggcagaggtccctgcggccttccgcagtgtttgtgtccctgggtacttgagagtagggagtggtggtgacttttaacaagcgtgctgccttcaagcatttgtttaacaaagcacatcctgcatagccctaaatccattaaaccttaagtcgacacagcacatgtttctgcgagcacagggttgggggtagggttacagattaacagcatctcaagtcagaagaatttttcttagtacagaacaaaatggagtctcttatgtctatttctttctacatatgcccagctaattttgtattttagtagagatggggtttctccatgttggtcaggctggtcttgaactcccgacctcaggtgatcagcctgcctcagcctcccagagtgttgggattacaggtgtgaaccgctgtgcccgacagttgctgtttttaagacattgaattttagagtagtttataatgtggcaaaaactaaattataaggaaaaggatatctacaagtggagtgctatcctaacaaaaactgaaatatgtgtcagtaattttaggacaaggtgttagtgtgcctggaccaaactgaggatcgggctgctatttcttgtggcccaataacgagatgcagttgaactggagaggaagagagttcttatttctgcaactggctacagggagaagacctggaaattatggccaggccaattcaaaattacaaagttttccagagcttatataccttctaagctgtatgcctacgtgtaagtgtgcactcatctaaagacataagtgattaacttcttttaatctgtaactaaggtctgagtcctgaagaccttcctctggagcctcagtaaatttacttaatctaaatgggtccaagtgctgaggtgattacccgtatcttgtctcctgctaaatcacggaggtttggggagttccttcagacccccagtaaacttgtttgcagaggcctggggagtttcttcagacccacaataaaacatgtttaatcctaaatgggtcctgttaagaattccttcgttattttgtcatgctttaaggcccagggaagggctaggcaaaactcttggtgggcttttgttacattccagcctttgtataagggcactggctttttagcttttaatatttaacttaaccactcagtcagtattgaaacagttgttatggaggcctgtgttagtgagacttggcctgccacattagggcagaggctggaaaagcagtgaggaaacagcaaaacctggaaaattagctaggaaactgctattgcaggctacaaaacatggttacacatgttatgtggttttgaaacaatttccaaaagtgtagtttatgataatatggaagatggaaaagcttcttaatgaaatttggatttgactaaggaggtctacaggcaaaatgttgaaagtgacagctgattggtcctagctgtgtataatagagtataagaaaagagagatgagccaaagcaaaaactgttcagttttcaagcaggatttatgaggaatataaaggggccagggcaggctgagttggaaaataaaagtacttttaatctctatcatccagctagaagattttcaaagtaaatgaaaacctgaagtcaacttctacttctggccaacatggagtaacagggaccagatgtatcctcctgatacaacaaaaacaaaagacagaatatctgaaacaattatttccaaaacactgcacatcaggcactaaagaatagtcatcctggagagatgagaaatgaatgaggtaaaccctacaattgctccagcttactcccttcagagagtttacaggctgtggcacagggaggggaaactcaggcaaagccagaagaatccctaaattgggagtccaaggtggctagagtttgtaggacatagtcctgaagaggagacagctgcacagagagagaactctggaaatctgcagaggcttcccctcaagtttttagcagaaggctgagcagggcatgcacatgaggaaattacctgaggccagggaaagaaccacccgctgctcacttagggcccagaataaagccttgtcccactaattagtgtggaaaatctcctgatttttggagcattggatagagtactccaaaggaccttgcctcagtggtggggaataattagctttagactaaatactgttctcattccatataattcaccttattaacaaaccaaaaaaatcatatgagtatcgcagtaaacatagatgttgaataaaatccaacatccatttctgatcaaacttctcagcaaactagaaacagaaggaaaattccttaacctaataaagggcatatatgaaaaacctacagctctggccagtataatcagttaagaggaagaaataaagacatccagatttgaacagaagaagaaaaattatctctatgtgcagatgacatgatctgatggactgtacaaaagagctaccagaactaataagctagtttagcaagtttgcaggatataagatcaatatataaaaatcagttttacttcaatatactcacaacgaacaatcagaaattggaatttaaaaaccaatactggccgggtgcagtggctcacgcctgtaatcccagcactttggaaggccgaggtgggcggatcacctgaggtcgaaagttcgagaccagcctgaccaacatggagaaaccctgtctctactaaaagtacaaaattagccaggcgtggtggcacatgcctataatcccagctactcgaaaggctgaggcaggagaatcacttgagcctgggaggcggaggttgcggtgagctgagattgcaccattgcactccagcctgggcaacaagagcgaaactccatctcaaaacaaacaaacaaaaaccaacaacaacaatagcaaaaccaatactattaaaaagagcttcgaaaaatggaatatttagcaataaatgtgacaaagtatttgcaagttgtgcactagaagctacaaatattgctgagggaaattaaagaagatctaaataaatcttgagatatactgtgttgagtcagaagactcaataatgtgaagatccccaaccattcccagtttattaatccatagattcaacacagtcccaatgaaaatcccagcagcctttttttaaaaaatagaaatcaacagactaattctaaaattcatatgaaaacgcaaaggaactagaataagcaaaacaacattgacaaagcagaacgaatttagagaactaacactctaccttatttcaagatgtattataaagctctactcattaaacggtgtggtattggtgtaaagataaataaataggttaatagaacagaatggagtccagaaatagatccatacatgtgtggacgacagactttttgtgtttttgctttgtaaataatctgtttattttagaatagatttaggtttatagaaaagttgtagagatagtacagagagttctacatacctcagacccagtttcccctattcacgtcttacattggtatggtaaacttgccacaattaatgagccaatgttgatgcattattattattattattttgagatggaattttgctcttgttgcccaggctggcgtgcagtggtgtgatcttggctcactgcaacctctgcctcctgagttcaagtgattctcctgcctaagcctcccaagtagctgggattacaggtgcctgccaccacgcccggctaaatttttttgtatttttagtagagacacaccacgcctggctaatttttgtatttttggtagatggggtttcactgcattgcccaggctggtctcgaactcctgacctcaggtgatctgcctgctttggcctcccaaagtgctgggattataggtgtgagccaccgcgcctggccttgatgcattattattaactaacggaggggtccccagtccctggactgcggacaggtactagtctgtggcctgttagcaactggtccgcacagcaggaggtgggtggcaggtgagcttgcattaccgcctgagttccccctcctgtgggatcagtggcaacattagatcctcataggagcacgaaccctattgtgaactgtgcatgtgagggatctaggttgcgtgctccgtgtgagaatctatctaatgcctggtgatctgaggtggaacagtttccccccaccccagtctgtggaaaaccatcccccgaccccagtctgtggaaaaattgtcttccaccaaaccggtccctggtgccaaaaaggttggcaactgctgaacgaacgcatactttatgcaaattttcttagcttccacttcatgttatttctctgttctaggatcccatctaggatacggcattacctacattcagtcatctcgtctccttgggctcctcttgattgtgacagttccttttttttttttataatcttggcagtttcgaggtgtactgctcaggtattttgtagaatctcccttgactaggatttgtctgatgtttttctcttgattagattggggttgtgtgtttggggaaggaagaccacagaggttaagtgccatcctggtggcattttaggatgcaaaaattgtcaactcattctatgaagccagcattattctgcttgaataaattatatcaaggatacctactatcaatatgatgtatcactgataatggtaccaatttttctagagtcaacacttgtaagtctgtttggtgacctgtgtcacattccagcatgcagagagactgaggtctctcaacccaaacagaaaggaacccaagcatagaactagacacacccactgtatgtacctactatgtgttggctgctgtatttggcagtttacatgaatgatctcattttatcccataagagagatgccagtatcttctttgttccacccacgaggaaaatgaagatcagagaggttaagtaccttgcccaaggttgaccaccacagcataatcttattatgggccaccatctctctcagttgcagccaaatggaggcagtgccaaaattaagagtgtgttcatgggcaacagctggaagaccttgccctagtgcccatcagaagggccagtagctgaggcggggcaggcaggtgtcagtcggacccgctcggtggtcagcagtggtggtagtggggctggagtaaggagcctctgggctcaggtcactgaatggggctgtcaaaagcaatgctagatcctcttaggtaagaactggggcaagcaggtctcaaggccaaggtctagctagaggtaggatacacagtgagagcaggatcaaaggccaagtccacttgacccacggtcagctcagctctccaagctgcccctgcctgaaagtgatgccctattcctgggcaggaagagcctagaggcctgtggaccagaagccgggcagagtctcatgcccaggcgcgttctccctctcagctggcccgcaagctctcttaagccgattaggtgcttttttctactctctgtttctctctcaaaataactttactgagggatattttggatcctataattcacccttttcaagtgtacaattcaataatgttttagtagatttcctaagttaggaaaccatcaccataaatcagtttgagaacactttcattagatcaataggatccctcgcgcacacttctggttaaccctcctactgctctcaccctgccccaccccatccactctccaagcaaccatgaacctactttctgcctatagatttgtcttttctggataactcacataaatggaacccaacaatatgtggtctcttgtgtctggctttcttcactgagcataacgtttttgaagttcatctgtatcatagcacatattcatagttcattcctttttattgctgactagtatagcactgtatggatatagcacattttgtttatccactcatcagttgatgaacattcatttgctctgtcgcccaggctggagtgcagtggcacgatctctgctcactgcaacttccacctcccgggttcaaatgattctcctgcctcagccgcccaagtagttgggataacaggcatgtgccaccacgcccggctaattttttttgtatttttagtagagacggggttttgccctgttggccaggctggtcttgaactcctgacctcaagtgatccgcttgccttggcctctcaaagtgctgggattacaggtgtgagccactgcgcccgacctgtttctactttttgactgttatgaaaactgccgcaaagaacattcaagttgcaagtatgtgcatggatatacgttttcattctcttgtccaaccctctctctttagcttccatttcttttttattgggtttcttctacactttctacttctaagattatccttcctttcttcagcttcctcactggcttcctgttgtcttcagcattaaactcaaaccccttagtgtggtcggagaaggtgccttcctccccattcaatcttatctcttgccactctctttttgaagtgaagaggtgtatcacttacagaatggagacacactgagacacaagtctagaaattatttctcacgtgttctaatgttactcattgccagtcccccatataagataatctgcactaatgataacatattcttgatttgatatagtaactaaatgaccactttggtttttgtttgtttgtttttgtttttgagatggagtctcactcttgtcactcaggctggagtgtagtgttgcaatcttggctcactgcaacctccacctccgaggttccagcaattctcctgcctcagcctcctgagcagctgagattacaggcacccaccaccacggctggctactttttgtatttttggtagagacatgctttcaccatgttggccaggctggtctcgaactcctgacctcaggtgatctgcccacctcggccccccaaagtgctgggattacaggaatgagccaccgcacctagccagcctttactcatttttctaatggctggttgtatttttcttattgatttctaagaactttaaaaacgcttctcgataccaatactttgttctttatttgtgaagcagatgtcttcttctagtctgtgacttgatttttcactctttttctggcatccattttcaagtagacgttttaaattgttatttgtcctgtttgtcagtctttttctttataatttgtgctttttgtgtcttgtttacaaacaaatccttttcactcctggaaagatcagaaagatacagttgatcctcattattcatagattttgtatttgcaaatttgcctacttgccaaaatcagtatcttcagtgaccacatgcaaaagtagtgaaaaaatctgagtcacgcacattcccagctgaggtggaacaaggtgacactctgccttcttgtctcagctgtcaaactgtaaacaagtgtccttcttgaggcacatttagtgccaccgtttccacatttttgtgctttttgtgggtgactttgctgtttaaaatggcccccaagcatagatggaagtgttgtctggcactcccaagcgcaaggaagctgtgatgtgccttacagagaaaacacgtgttagagaagcttccttcaagcatgagggatggccctgttggccgggagtttagtgttcaggaatcagcaatacaattcaatgagatgcctttcaacagaaacatacacaaaacaaggttctggattgatagggtgatgaaaatgtcgtgaccagaggctcacgggaaccctaccctgtgtttcccttaagagcaatggttcagtatttgctaattcagtgttcacagcgagtttatagaacacagctattgtgaataatgagaatcaactgtatcctccaaaggttttttttaaattttgcttttcaagagcatttagctctctcatccactagaaatgattttaaggtatgatgtgggagcacagtttattgaacagttcattctttcctactcatttgtaaggccgcctctgccatacagtaagcttccatatccacatgggtctgtttttaggccttgtgatccactggtctctttgactatcttctcactaatatctcatgtatcacatactataggtttgtaatagtatttttttttttttagatggggtctcactctgtcatccaggctggagtgcagtgacatgatcatggctcactgcagcctcaagccccctaggctcaagcagtcctcccacctcagcctctcaagtagctaggactacaggcacacaccaccacacccggctaacttttttattatttgtagagacaaggtctcacaatgttgcccaggctggccttaaactcctgggctcaagtgatcttcctgcctcagcctcccaaagtgctgggattacaggcatgagccacagtgcctgtctataatagtcttgatatctggtagtatgagccccatccccattacctttattctttaacatttttttttttggccctttggcactttgtacagattttaggatcagtttgtgaattctgtaaaatcctctgttggattttgatgggaactgcattaaatttataagctaatctggagaaagttgccaccttcgctatattgagtcttcccatctgtgaaatggtacattttttcaatcattttagtcttctctaatgtctttcagtgaagaatttattatcatccctataatcttgtttaaaaaacgtattccctgatacattatggggttactgttctatttgatgtttcttcaatccttcttgtcctttttccatagagtttagttctattaggatctgattgtgtcttatctagtctgcagttactttatatgtatttttaaaataatctctttctggttatctgtgtgcatttggagtttgtgggggtataattgtatgtttgtactatgtgcagactgttgattgagttggattagtcaccaatgggctttgtaatattctactgtgaactcatcattagcagggtttatttttttgtgtgtgaacattccatgatatttgggatgtgggagcttcaattcaaagaagttttttgtttgcttctgccttgtgccccaggagtatcactgcttgatgaataattctcacggtactttttagtctggagtttctgaactatgtgggtagagtaaaagcaatgtgaattgtggtcttgtggttttgacttctcagagagcttttatttttttcccaccaaaagccctgtgtcctgtggtccctcttgtttttaaatcctttcatttatagaatagttatttgagggtctcagctgtaagcaaagctctctgggcaattccctagctcccagagccccaaagcctcatttcctgcccctgtgtgggcattcattcccaaacccccaggctctgcagacagttgctccccattaactcaggcactcacccttctgctttttcatttccttctttgtttctggcacccggggatttgattttattatttgtgggcctagctctacatttaaaatagttaagttacattttacccagtatttctaagtgattatagtaaaagaattttcaggttgtctgagtccaccatattgctagcagttgataagtagattgtttgtattctttgctgtttgttaataatctttaggcttcatattttttcccagacaatgaccaaatgttcataatatgccatgtgcttgagttatgcaacataaatcatttcctgggtctcaatttttaaaccttagtaggacctacttctaaatttctgtatcttttttacatagatgggatcatatatgtattttttgaggtggggtctggctatgttgcccaggctggccttgaactcctggactcaagcaatcctcctgccttagcctcccaagtagctgggattacaggcacgtgccaccacacctggcctatactttgttgttgttgttgttgttgtcatttttaaacaagggcatattattttcctttttccctttcctcccccaatatcagcatgaccctcatccccttctccctcactgagggaagccattttaacctgctatatggccttccaagtttttttttttttttttttgagacagagtcttgctctgtcgcccaggttggagtgcaatggcttgatctcagctcactgcaacctctgcctcccggggtcaagcaattctcctgcctcagcctcccaagtagctgcgattacaggcgcctaccaccacctctagctaatttttgcacttttagtagagatggggttttgccatgttggccaggctggtcttcaactcctgacctcaggtaatccacctgccttggcctctcacggcctccttacaggcatgagccactgcgcctagccagctttccatatttttatctgtctgcatataaatctatagagactcacatatatcctcatatgtacatgtatttacacccccaggaatacataatcagggtggttttattgttgtatgctgtatgaaaatgggattatatatatataatatatatattataatatattttatatatatatatatatatattttttttttgagatggagtctcactctgttgcccaggctggagtgcagtggcgccatctcggctcactgcaagtgccacctcccaggttcacgccattctcctgcctcagcctccccagtagctgggactacaggcgcccaccaccacacccggctaattttttgtattttttttagtagagacggggtttcaccgtgttagccaggatggtcttgatctcctgacctcgtgatctgcccgccttggcctcccacagtgatgggattacaggtgtgagccaccgcgcccggccaaaaatgggattatattatacatgattttccacatcctgtttttcttaaccaacaatcaatacctagttgaaatccctgcaagttattacaattttaagtctggtgtttctcaatacacaaatcatgaatgtactgcttgatgagtttccacagtgaatacacccacgtaaccagcacccagatcaagacataaaatattaccagtgcccgagaactgctacctctcccaacgtgcctcctccccttgacctcccacctccccaagggtatccatcctcctgacttgtaacagcatcgatttctttagtctgttttgtgccttacataaaagaaacgttcagtacatacttttttgcatattatattcttgacatttataatgttgttgcatgtagttgtggcttgttcgttctggttgtggtatactatcccattgtgtgactataccagaatttatcgatctattctccttctaataggcattggggttattatggccagtgctgccatgaacgtttttgttcattaattgattctttttaatggctgtataatattccttgctatggaggaccaccctttattcagcgatcctacttttattaggtgtttactttgtttcctgttcttgaccactaaagcaaagctgcaataaatattgtatatatgtccctatgtagagatactgatctatctctactaatggaacaatgtattagtccattttcatgctgctgataaagacatacccgagactgggtaatttataaggaaaaagaggtttaatggactcgcaggtggctggggaggcctcacaatcatggcagaaggcaaaaggcacatctcatatggcggcagaaaagagaacttgtgcagggagactcccctttatcaaaccatcagatctcgtgagacttgttcacttccacaagaacagcatggaaagacccgcccccatgattcaattcctcccactaggtccctcccacaacatgtgggaattgtgggagctacaattcaagatgagatttgggtggggacatagccaaaccatatcagacagattgcaggaagtcaaattgctggttagtatagtaattgccttttaaaagtaaatgctgttgcttgtttttaaaacaaaacaaaacaaaaccctgtgacaatgccattactgtcagcaatgcctgaaaattcccctttccctcatctctgtcagcattggatgttagagttctttctgtgttttgtgaatctcatgagtataaaatgatattagcatgatatattccctgaccactagacaatttaagcaccttttcatgtgttgggacttgttcttcatattttttgctcatttttttttttttgggtctatacatctttttctcatcaatttgcaagatatttttgtatactgtagaaattaaccctttaggccaggcacagaggctcatacctgtaatctcagcacttcgggaggctgaggtggggggtcacgaggtcaggagatcgagaccattctggccaacatggtgaaaccccttctctactaaaaatacaaaaattagctgggcgtggtggtgtgcgcttgtaatcccagctactcaggaggctgaggcaggagaatcgcttgaacccgggaggtggagattgcagtgagccaagattgtgccactgcagtccagcctgggtgacagaatgagactctatctcaaaaaaaaaaaaaaaaaaagaaattaaccctttattatacatttttgtccacatctattgtttgtctattgactttgttcatgttaccttttgccactgagaactcaaaataaaatccacacccccactaaccagctgagtggaacccctcttggccaagggcaccccagaaagaccttaaaaactgtgttccctgccatgagagctgggaggttggaaacatctcgttataccatctccctctgcagtttagacagaacaactaaccagaattaatgctgaaatagagatcataagactgatggaagggaccctctgtggcaataagataccaaattataaacaagacctaaagccacgccaggcaagggttaagttacacgctcctacacttaaagaatcaactatgggccgggcgtggtggctcacacctgtaatcccagcactttggaaggccgaggcaggtggatcacctgaggttggagtttggttttttttgtgttttttttttttgagacggagtctcgctgtcccccaggccggagtgcagtggcgcgatctcggctcactgcaagctccgcctcccgggttcacgccattctcctgcctcggcctcctgagtagctgggactacaggcacatgccgccacgcccggctaattttttgtatttttaatagagacggggtttcaccgtgttagccaggatggtctcgatctcctgacctcgtgatccacccacctcggcctcccaaagtgctggaattacaggcgtcagccactgcgcccggccgaggttgggagtttgagaccagcctgaccaacatggagaaaccccatctctactaaaaatacaaaaaagttagctgggcgtggtggcgggtgcctgtaatcccagctaccaggaggctgaggcaggagaatctcttgaacccgggaggtggaggttgcagtgagctgatatcgagccattgcactccagcctgggcaacaagagtgaaactcagtctcaaaaaaaaaaaggaatcaactgtgttctaattgccacaaggatttttcttttcccttttattctagcaactaaacaagcactggttttgaaataagcaatgttgatgcaattgcagctcacccaccaccaaacactaagtgaccccccaaccctctgttctaccagccatcactacagctttgatagggactaattgttatccatttaaatgttaagtctccccgccaaagtgaacatgggatgtaacccgttcagcataaatctttgttccccactccctcgaagtgtctgctggaggctacacttcgcagcctgtgggatagccagcctgcaggctatataaccctttataagaaataaaggctcctttcctgtctgggcatggaggctcatgcctgtaatcccagcactttggtaggccaaggcgggcagatcacgtgaggtcaggagttcgagaccagtctggccaacatggtgaaactccgtctctactaaaaatacaaaaaattagctgggcatggtagcacatgcctataatcccagctacccgggaggctgagacagaagaatcatttgaacccgggaggtggaggttgcagtgagccgagatcacaccactgcactcctgcctgggcgactgtgcgagactctgtcttgaggaaagagaagagagagagaaagaaagaaaaagaaaagaaaagaaaagaagaaaaaaaagagaaagaaaagacatgaggccaggcaagccttttccagataaggttgattaagacatgcccagaaatgttgggcataagggagacagtgcaggagaaaaaaattctccagctgcctctgaggggagtgcactgcggtgtcttaatgagggtgacatacctaattcatgaggttaggagagtgtccacatgtgcagggtggaattcaagaagcacaggcgtagtaaggggttatgctaacacatacatcacatgagcggaaaatggcagataagcccctccttgggcggtctggtcttgtgcacatgtgggtgatagggttaactcctttgagtaagatttatgttgggatattgcttattttagtttttcaaggtcctgcgatcagccagtatggtgccttgagtaagatttattgggggttgctgtttatcttagtttcttcaaacagcttgcaaggtctggtcagtatgtatggaaaaatacattagtgggcatgggccaagtcctgtccctatggcctcataggtacttattcaaaaaagcctatttactgttgtaatgtatctggtatccagtctccttaccaaatatcgttactctaaaagttttttaatagaattgttacagtaggtagctagtcagacattaaacaggacaggagagcacccctccccttccctgccaaccaccaccaggaatgtcagatgtcaggtgaccatcaggtcatggtcagtcggttaactgtctctctaaaataataattggtcacagccagcaccagggaaaagcagtttcccaatagataaaaacacctgaaactgatgatcagcggtttcccagtaagagctcaggaattgggcgaatgcgctggagcatgtgcattaaggggcaaaatggaggagtttaagtggtatatgaccttctggggacattctattggtaaagggaagaacgcctcaggtgagcatgcgtacacctccagtaaacacactgcgcatgctcacctcccaattgctggcaggccaccgcgcatgtgggcagcccccataagggaagaatcaagggaaaaaggatgcaagatgcgggaagtaggccagcatatacaaccccaagtccaaggtgaaatgaggcacttgacctccaagatgcccccttggccctcttctaagtactttcttttaattcctgccctaaagcttttattattattattattattattattaagacagggtctcactctgtcgcccaggttggagtgcactggcacaatctcagctcattgcagtctctgccccctgggttcaagcaattcttgtgcctcaaccttccgagtagctgagattacgggcacacaccaccacacccagctaatttttgtatttttgtggagacagggttttgccatgttgcccaagctgctctcaaactcctggactcaaatgatctgcccaccttggcctcccgaagtgctgggattacaggcgtgagccactgcgcccagctgactctaaagatttttttgtttttgtttttgagacggagtctcgctctgtcgcccaggctggagtgcagtggcgcgatctcggctcactgcaagctccgcctcccgggttcacgccattctcctgcctcagcctcccgagtagctgggactacaggcgcccgccaccacgcccggctaattttttgtatttttagtagagacggggtttcaccgtgttagccaggatggtctcgatctcctgacctcgtgatccgcccgtctcggcctcccaaagtgctgggattacaggcgtgagccaccgtgcccggcctctaaagctttttaataaattttcactcctgctctgaaacttgccttggtccctttttctgccttatgcccctcagttgagttcttgcttctgaggagccaagaattgaggttgctgcagaaccatatggattcactgccagtaacggggtctcgggttttcaaggtagacaattatagcatcagcaaatagaattcatttatatctcttcttttagggttgccagctttagcaaacaaaaatacagaatgcccagctaaatatgaatctcagaaaaataaggaataattttttagtataagtaagtcccaagtactgtatggcacatacttatattaaaaagcgattcatgatacatttgaaattcaaatttacctgggtgttctgtattttatctaacaaccctctttctttcccagcgaggatgcctgctgctttattttctttttctgttgcatttgctgaagcctctaagactggttctcattctgggctacacattagcatcagccaggaagctctgaaaaacaaaacaaaacaaaacaaaaaaaacctcctatggcaggcaggcccttaggctcagagatttaattggtgtatatatacatatatttaaaagcttcccagattgatgctaatgggcatctggggttgagaaccactgccttaaatccatgttaaataataatgttagtaagcatcaagaatcttgttcttgattttaattaaatatttccagtgttttgacatttaaaataacacttgttgttggtttttagtaaatatccttcgttttgtttacatagtttccatctagccctgtttaagttttgattaggaatggttgcttttagcacctattaatatgattatgtggttttgagaaaagaagaatagaacagtctgggctatgtgtggtctgcaggcccagaaagacacgaatatgggactttcattcctccctgctccccctctccccatgcctgggggcaattgtttaaagtcattttgttcccaaccagctgtctcaccctttgccttcttgttcctagaatttgggtttgtttgtttgttttttcgagatagggtctctctctttcacccaggctggaatgcagtggcttgatttcagctcactgcagcctctaccgctcaggctcaagcgatcctcctgcctcagcctcccgagtagctgggaccacaaacgcacatgaccatgcccagctaatttttttattttttgtagagacaggggtctccctatgttgcccaggctgatcttgaactcctgggctcaagtgattcacctgccttggcttcccaaagtgttgggattacagggaagagccaccgcctggcctggaatttgtaatacaaagaaccctgtatgtagcctgtcagtagtttgttattttaatgtaaattcttggtaaacaactgaggaacttcctcttcctttcctttaaaaatccacttgtaggccggggcggtggctcacgcctgtaatcccagcacattgggaggccgaggtggtcggatcacgaggtcaggagatcgaaaccatccatcctggctaacacggtgaaaccccgtctctactaaaaatacaaaaaaattagccgggtgtggtggtgggctcctatagtcccagctactggggaggctgaggcaggagaatggcgtgaacccgggaggcggagcttgcagtgagtggagatcgtgccactgcactccagcctgggcgacgaccgagacgccgtctcaaaaaaaaaaaaaaaaaaaaaaaatccacttgtaactgccactaatccagagtgtatattcagggcaacttgaatctgttctcttgaggactaatctctgaccttttttccctcttgcccaaattcctatctaagggacctgggaagttacgccataacatcacaaaccatataacatcacgaaccataacatctcatcaggtgaattttatttaactctatataatgtgttactttccaacctgactggcataacaccactggacagagaagaaaatcaaaatattgctagtgaagtggcggaagtggcagctatggagctgctggaggagagagaaacattgctgtgtggttagaaaaaatatttgggccgggctcggtggctcacgcctgtaatcccagcactttgggaggctgaggcgggcagatcacaaggtcaggagattgagaccattctggctaacacagtgaaaccctgtctctactaaaaatacaaaaattagccaggcatggtggggggcacctgtagtcccagctactcgggaggccgaggcaggagaatggcttgaacccgggagatggaggttgcagtgagccgagatggcgccactgcactccagcctgggcaacagagtgagactctgtctcaaaaataaataaataaataaataataaaaaaagatattatatatggagatcatcccattccacagtatgaggtgaacccacggaccacagagattttacatcacctttcagaacgcaacagggtccagaacagggatgtctacctggtaatagaggacttgaagcagaaagcaagtgaataccagtcagaagccaagtatctccaagaccttctcatggagagtgtgaattttttcccctgccaatctctctagcactggttccaggtatctgaatgctttggttggcagtgcggtggcccttgaaacgaaggatgcctcactaactagttttatccctgtagtgaatgatttgacctcttacctctttcgtaccaaatccaaaagtgaagaaatcaagattgaactggaaaattttgaaaaaaaatctaactgcaactttagtattagaaaaatgtctacaagaggatctcaagaaagcagagttgcatctgtctacagaaagggccaaagttgataatcgtcatcagaacatggactttctaaaaccaaagtcagtggaattcagatttggaatcaaggctgcagagggagcaactttcagccagaggcatggatgcttctctgtctcatcagtccctagtagcactgtcagagaaactggcaaaattaaaacaacagactatacctttgaagaaaaaattggagtcctagttagatttaatgccgaatccatccttgctcaagtgaaaattgaagaagcagagtgagaattagatagcattgaagctgaacttacaagaagagtagacatgatggaactgtgacaagagccaaataaacagccttttccctaacaaagtaaattgaataggacttcacagagttctttttcctcttggcatttcttaataacaaaattttctgtgttcttagattacagaatatcataattgatagaatatggtttctaactgtatttcatttttgtgcccaaatacatcgttttcataaaaaaaaatcaaaatatcttaccccaaaatatgtgtttttttgccatattttgaaatggccctgcaaagccatctttggtgggggaaagtttgcatctgtaaagaatctccattaacataactagatcctccccttccagaccctcccaatcctgaagagataaactgagagtctggcaccttttaaaggtctgaataggaaacatttgccatctattgtctctaagggcattcatctgtgacacttcctagcaaccttggtctccacaaccccttatcttaacccagacactcctttctgttgatgccaggtctttagataataatttaactctttcaaccaattgccaatcagaaaatctttgaatccacctgtgacttgaaagcccccccacttcgagttgtcccacccttccagatccaaccaatgtatatctcacatgtattggttcatgtcttatgtctccctaaaacgtataaaactaagctgtaacccaaccaccttgggcacatgttctcaggacttcttgagactgtgcctcaggccatggccactcatatttggctcagaacaaacctctttaaatattttatagcgtttcactctttttgtctacactcctgggttgcagttcttatacttggcccaaataaactctactcagatgaattttgcctcagatgctgggcgcattggctcacgcctgtaatcccaacactttgggaggctgaggcgggaggatcacttgagcccaggagtttgagaccaacctgggcaatatagtgaagacctcatttccaaaacaaataaaagaagtattaaaaaatgtgcctcagcttcttccttttaggttggcagttttctcctttagttcattgatgcaaagagtcatattgctgggtttctttgtattgaagaactttctaattctgttgttcaatgccaaagtctgtttgctaatattttatttagactttgcctctatatttatacatttagttgaagctgaggatctgttattgttggaattaccattgtctgattttggtatttaagtaacgttggctttgtaaaataaactggtgaactttgtatctttttttcctactttctgaaatagtttaaattgttgctactcaaagtgtgggccaagaaccaacaatatctgcctcacctggagcttgctagaaatgcagagtttagggccccgccccaggtctattgcatccgaatctgcattttatcaagagtcacaggttatcagtgtacacattcattttgagagaagtgggtacaaataccattagtctcctttgtccactaaaggttagataaaactcagccatgggtgatgcagtcctggtgcctgtttcacagtggattgctactccccttcccaatctcttctgtgatcattgctctatttcagtaattggtctattttggtaacttcaattttgcaaagaaatcatcaatttcctctaaatttttcaaatttacttgttactgcttcttaagatttttttaaatttgtagttatgtcacctttctgactcctcctcttgtgaacttctgccttctttctctttttcttgatctggcttgtaagagatttgtctctatcgttagtcttttctttttctttctttctttttttttttgagacagagttttgctcttgttgcccaggctggagtgcaatggtgtgatctgggctcactgcaacctccgcctcccaggttcaagcaattctcctgcctcagcctggcttagcctcccgagtagctgggattacaggcatgcaccaccatgcccagctactttttttgtatttttagtacagaaggggtttctccatgttggtcaggcctcaggtcaggcctcgaactcccgacctcaggtgatcgcccacctcggcctctcaaaatgctgggattacaagcatgagccatggcgcccagcctcattagtgttttctaagtaccagttttacatttatttatcctttgagatatttggggggagggtatttgttttctatttcacttgtttcagcttttatctgtacacatctcggctcactgcaagctccgcctcccgggttcacgccattctcctgcctcagtctgcccagtagctgggactataggcgcccaccaccatgcctggctaatttttttgtatttttagtagagatggggtttcaccatgttagccaggatggtctcgatctcctgacctcgtgatccgcccgcctctgcctcccaaagtgctgggattaaaggcgtgagccaccacgcccggcctttttccctaatttcttatgattggtataggttattaatttttagaaatttttaaaaataatgaaggcatttaaagctgtaaattttcctttaagccttgctttcactgtgtggtcagttttagtgtgaagtgttcttttcattagtttctagacagtaatttcccttttaatttcctctttattcttttttttttttcttttttgagatggagtctcgcactctggcccaggctggagtgcagtggcgccatctcggctcactgcaagctccgcctcccgggttcatgccattctcctgcctcagcctcccaagtagctgggactacaggcgcctgccaccaggcctggctaattttttgtatttttagtagagatggggtttcaccatgttagccaggatggtcctgatctccccatcttgtgatccgaccgcctcagcctccaaagtgctgggattacaagcatgagccaccacacccggcctaatttcctctttattctaaggagtttccaggagtgtttcgtattttccacatttaaaatatttcaaacttcaaattttcactcttttattattccttaaaattttaataagattttccctgtggccatgtacctaatctatttctgtaaatgtttcatggacatataaacaaaatgtatgttttccatttgaagaatgtaaggctctctatgtacttgttacactaaattgttggttgtatcagtcactttgtctttgcccttactgacttttttgcttattaggtatattcagttctgaaagaagtgaactgaaacaccctactaaaactgtattttggccaggcgcgatggctcatgcttgtaatcccagcactttgggaggccaaggcaggcagatcacttgaggtcaggagttcgagaccagcctggctaacacggcgaaaccccatctctactaaaaatacaataattagctgggcatggtggcgggcgccggtagtcccagctactggggaggctgaggcaagagaattgcttgaacttgggaggcagaggttgcagtgagccgagattgcaccactgcactccagcctgggcgacagatggagactccatctcggaaaaaaaccaaaactatatttttattctgtttgtatttctatattttttcattttatgattttagtgtctatgttatttagtgcacataagttatgaatgttatatattcttaattgtacattcttattatacacaagttcttcttcatcctgtttagggttttgaacttcaactttctccatacctctgctcttcctgctttcttcttattggcatttttctgatatctttttggcatattgttttcaatttttctctctcattttatttttgcatttttccctgtgagcagcatatacctggatttttacttttaactctatctgataatctctgtcttttcttgagtgaattcagtttaatcacctctggtaagttgactgatatacttgatttcattttattcatcttactctattaaattgttggttttttttcctctaatttttctagttaaattgccgctcattccattttcccctttgtgaatacctactgttgttagacttttaatgtgacttataggtatatgggcttttaaaaaaagactttatgtgagattttaagtgataaagtaacagatacattcatggagttgaaagacaagttggtgtccttttgactgtaactcaagtgatctttccacaataccagggctttggagcaaaaccaaaaatttcctttttttctttctttttttgagacgaagtcttgctctattgcctaggctggagtgcagtagtgcaatctcggctcactgcaacctccacttcccgggttcaagtgattctcctgtgtcagcctcctgagtagctgagattacagatgtgcaccactacacctggctaatttttgtatttttagtagagacagggttttgccttgttggccaggctggtcttgaactcctgacctcaggtgatctgcctgcctctgcctcccaaagtgctgggattacaggcatgagccaccacacccagccccaaaccaagcatttctaactgaaaaacatggctcatgctcagcccagcttagggtcagggttatcactctatctgggcacaaatctcatcttgaattgcagctcccacaattcccatgtgttgtgggagggacccagggggaggtaattgaatcatgggggctagtctttcctgtgctgttctcgtgatagtgaataagtctcacgagatctggtggtttgataaagggggcgttctcctgcacacgcactcttgcctgccaccgtgtaatatgcctctgctcttccttcatcttctgccatgattgtgaggcctccccagccacgtggaactgtgagtccattaaacctctttcctttataaattacccagtcttagctagttctttattagcagtgtgagaacagactaatacaggcccttacccagtcattgacctagaggggctggactgccatagcgggatcgcagcccctgatgactcccttcctggggtccctgggcctgtggggaggacagccatcctaacaggagcctatctggtgttgtcattttagaaagccttccggagaatgtacttggagctcctaataagatatctcgggccaaggaaaatgtcacatttctttgctcttggcaggaatcccagctccttggcttgggagcaccctttctcccatgctgaacagaaacttcatttggccattatgttcattgccaattaataaattataggagaacaaattaatttacttatcacttgcagctttggagaaaaactcgttcaaagcagggaaagtggggtgataaaaagatccctgcaggaaaaacgttggggatccccggggccacttacatgttgggtctgagtgggtgaaatcactcttcattacaaagctctcagaggatccgcagcaggggcacctcgtccacaacccccgcccccctgcccccagctggcctccaaagattgtggtgaggttccaaatgaggtgacaacattggaacttgctgcatcctgaacgtgtgcactgagtgatgagggtgctggcgctctggttgtggggaccctgactacacagccccgggtgtggctcaaagtgtcagtctcccactgcctaccagtgctacagaccccaccctgcaaatctcctaaagggagaaacctgctcccggctccaagcacgtggttgcagtaggaacacctgggaacacacgaaagcgtgctgggtggggtcaggaggctcagctctgtctgcttgggctcaccgctaatgtgtgtgagctggggcttgcatttcctcgcctacaacaaaagtgacggacagaatgcagggaaggcccaggtagcacccctatcctgtgagttctgcctccacctgcactgctgcctgtgggttgtgtgtgaagcacgtgaggccctgtccctcagtgctcagcgatgccgcgggtggtctgagatgatgttggtggtgatggtgatgaaaactcacacactagcacttctaccaagcccattggtattctaagggtttcacccatattaactcattaatcttcacaaccagcctatgaggttactgttattatcactcctattttacacaggaagagacagacacaggtgaagccacttgtcaacattgtgcagctggtacgcggtggggcagagcccagtcaggctccggggcctgtgtgtgggcactactgtgcgctgtctgctgtgtcccggtagccgagttaaccaaaagcagcacagagatcatgaaacttcattctaacctgagctttcaacctcctccctctcatcaaattttacttaaaatttcagaaactagcaagagtcgaaatggcccgatgtcccctccttctgtttcccctgccgcttgtccccatggccctgggggcatccgcaggagggaggtgcccctggggctggggagaggattctcctggcgtttgctctttttcctggctgcccaggtacactcttagccatgtccagtcctcaggctttccccaaaagggagaataacgggagcatgggccaaaatcctgagtgaaatataaaggccccagataaagcaattataaatggaaactctgaggctgtgattcactcaagcaacatgactcatgttctgctgaggtttccgtgaacaatatgttcacagtctgatttaattatagcctagatttactgctgcctcggggagcctccgaagctcaccccatccctcactacccccagcgcggcgcctggtgaaacgcctcccagtgcgagagtgggagcaggcactggaaatggttttctgcaggtgctatgtgtcacatcgtgcacagtggacagctcttgggacctcagctgggcggggaggcagagtcgtcaaataagttagagctctggggtacagctcaagcccccggggatgggggggattgtgcttcctgggcttcccctccgtgcaggggctcctgcagagttgaggtttgtcagcgccgagtgtgggcgcctagagtgatcgattgagagagagaatccagtcacagctccctcacgcgagggtggagggaaacccggggctgcctgccgaactcgggggcgttctcgcggggacccgataacaccggacagaaaatgtcccacttctcatcgctttgtgctttcagtgagaacccccccggaggtacagcatttaaaggggataatttcaaacgtggtgatgtggccacaattatatcctcgttatcagacaaaaactgtaggtcccctccctctgcaaagcacgaaagcatttgtgtgtatttcagtgtaacagaatgctgtcccccagtatctggtgccatgtgctctttccacgccccccgcaccccggccctgtttgcttgagtaaccagagtggaagagggcagcccactactgtgggctttagtgttgtcagctaaaatacaggccgccccgttaatttgcatgtcacataagcgatgcataatagtttcatttgcgcatgtcccaaatattgtccgggacatgcttgtgctaaaaccagattccttgttgacctgaaatccaaatttattttttgagacggattctcaccctgtcacccaggctggagtacaatggcaccatctcagctcactgcaacctctgcctcccaggttcaagcgatttttctgcctcagcctccaagtagctgggactacaggcgtgcgtcaccatgcctgcctaatttttgtatttttaggtagagatggggtttcgccatgttagatctcccaaagtgctgggattacaggtgtgagccagtgcactgggccttaaatccaaatataactgggtatttttttgtttttttttttttttttgaggcagagtctcactttgttgcccagactgtagtgcagtggcgtgatcttggctcactgcaaccttcgcctcccaggttcaagtgattctcctgcctcagcctcctgagtagcggggattacaggcgtgtgccaccatgcccggctaatttttgtatttttagtagagacgaagtttcaccatgttggccaggctgctctcgaacccctaaccttaagtgatccacccccacctcggcctcccaaagtgctgggattacaggcctgagccaccgtgcccggccggcgttttgtatttttagttgtcaactctggcaaccctacatggactttgaagtcatacaacctgatttcagatgcccctctgccatcaagggtatgggaaactctggacaaatgacatgggcattcggagcctccatttatcgtaaccacaaccacatcccgggaccatagcaaagatgagagcgaatgtacgtgaagcacgtagcacaggaagcggtatctcgttgtagtggaagctgttggccccgctgcatcccctttattggccggtgcactcatcctccagcttctaggaatgttgggtgccagcaacgcacagcgaccccctttcctggtgcattgccctggactgatgggaggtgcttgcctaagagcttgtgtcccatccgcgtcccccccaactgcccccattgccacccgcgggcagccagcagtcactggctaactgatggcagaggctgcttttatcttgcagtgctcactccagagccccctgtggcgtcgggctggctgggttccacctgatgccacaccctgctcagctccttcccctgtcactcttgcttccttccaggctgctccctggagcacactcttggcatttcacttgtacaacatgcctggccctggcacgctgctggtgctggtgtgcacactgatcacataagcttgtgagcattcagcgctgaaggccaaggatgccttgtgctctgagaatgggatctgcttgggggcaggagagacttggggtcggggtgcgttgctggggaacagacaagggatctgtcgcctcctgggaagctgggaaatggtgtggggtggggcgactgggagaggacggccagggacagcttcaggcctggtgtcctgcaaaacctgacacctagcagatgggaagatgcggctcagctacctcctcccggagccaggctgaggaggtcacgtgggcccaggaggttcagcctcagttgggctgtgcttggggaaataaatcatcaggactcaatgcagaaaaatgacatgaattagggggctcgtctgggtgccacgcgaacctctccctgtctctccaccttgcaggcatgcttttgggtaccgacacatgttcctccaggaggagtggtggaaaggaggaatcctttggcctccaaccctggaagaaggtgtatagttttaaagggcaaggcttggctttgaattgcagctctgccacttctttctccttctctcccttcccttcccttttccttctcttcccttttccttccctttccctttcccgacagtcttctctgttggccaggctggagtgcagtgatgcactctctgctcattgcaatctccacctccccgagttcaagagattctcctgcctcagcctcctgagtagctgggactacaggcacgtgccatcatgcccacttaatttttgtgtttttagtagagatggggttttactatgttggccaggctggtctcgaactcctgacctcaagtgatctgcctgcctcggcctcccaaagtgctgggtttacaggtgtgagctactgcacccggccccatctctgccacttctatacaggcgctagaatccagaccagcttctgaatatctctaagcctcagtttccctgtccacagaagggggtgatatgccttctctcagagaggtggcgtgaggaacaaatggcatgtgagggatgagtgtgcctaggatatggggaatggatgttctgcttgttttctttgccctagaagtcactgtatttcaacctgaatttccaaagaacattgtcagacacctaaagagaagatcacttgaaggaagttgaattttgatatttgaagtttaactgttttgccactcacagtacagttacttttgtttttttttttttttaaagacagagtcttgccatgttgcccagactggtctcaaactcctgggttcacaccatcctcttgcctcagcctcctgagcagctgggactaagggtgcgtgccaccacacccaactaattcttaaatttttggtagagatgaggtctcactatgttgctcaagctggtctcaaactcctgggctcacgtgatcttcctgcctcagcttcccagattgctgggattgcaggcatgagccacggtgccaggtcaattgcttacattttaatggccaaagggaagaagttgttctctaacttctgaaagtgttcggaaaaactgcagagcttaaatgactgctgagagatttgggattctgaacagacactgcgaggagccagagtttgggggttggtgacctggacacagctgccgccactttctgatggagagagggtcctctgagtggagctagtggcagaggttgtagagcccagcaccactaggagggatgggaggtccctgaggagggagaacaggcagggtcccacttggaagtaccgcaatggctgtgtcttccttggtccttccagggcgttgctgcttgtgattctttgctttcccagggtccatgtgggaggaaacagctcacaggtcatcaatgagacatcggagagagccgctaggtgttgtggcagatgaggcagtgcctccacgtgtgctcatgggcactcccggtcatgaagagtgacccaccttggcaaggctctggagcttggtggcctttgacatcccgacccagagcctattcaggatcccagtgtctccttggatttggagacactcattcattcccagcaatgaacaccaagcttttctcattcctttggcttgtacagtacagacccctcagcaactgcgctccatgcacgcagcactgtgtggacttgttcccctggtaaccaccttctattccctattactgtgagctggactttagattccacatagaagaaggatcacgtgatatttgtctgtgtctggcttatttcacttagcataatgccctccaggtgcattcgtgtggaggcaggacttcctcctccatttttttttttttttttaaggcagagtctcgctcggtcacctaggctggagtgcagtggtgcaattttggctcactacaacctccatctccggggttcaagggcttttcctgcctcagcttcccgagtggctgggattacaggcgtgcgccaccacacccagctaattttttgtatttttagtagagacagggtttcgccatgttggccaggctggtcttgaactcctgacctcaggtgatccgcctgcctcggcctcccaaagtgctgggattacaggcatgagccacttttttaaagagacaggacatccaagtccgaggagacacttggatcctggggaggctctgggtcaggaagccaaaggtcaccaaggtccagggccctgacagggtggggcactctttgagaccaggagtgcccattagtactcatggaggcactgtcccatctgtcgcccaggctggagtgcagtggcttcatcccagctcactgcagcctccacctcctgggctcaagtgatcctccctcctcagcctcttgagtagttgggaccacaggcgtgtgccaccacatctgggcccactctgcctctgctatgagtgctctcccccaatggccatgcagccctttctctcagccctttccagtctttgctcagatcttttcttcttgacaagcctatttaatactgctgcctgactccctcactccaatctttctttgaggcctgagccggcctcactgtggaattggctgcataacatcccgatttgttaaggtcgttgcttatcgtctgtctctgcctgaacttaggctctgagatgggaggaatcactgttttgttcatggattctcccacgtgtctaaatcagtgcctggcatgtagtaggtgctcagtaaatacgtgttcaatgcactgactgaggaaactggagcccagaatgattatgtgacctgcccaaggccacccagcacactggggaaggagcagggatggaagcctagactctggtaccaggatcagagctcttaaccaccgaatactactgctcacccagtgacacctgtggcctttgggtgacctccacccctcttgtctaggtctcattaggttgggctggcaccctgtgtgcccttcagtttccacccaggctggtgtctgggctcttttgggggttcctgctcccacctctatatccctcccaggaagtggactagactgtgtggtccccaccaactgtcccctcactgcctgttaccccctcactctctaccctgtcagaggagcaagacgcagccaactccttgtgacctcagcctggcctagggggtggctggcagctattagagtgggccttgactttgagagacccctgaatgacatttcaccagctctctgtggctgtgcccccagtcctttggccttcaggcgaatcctgccacctgtgaattcctcttctgtcagttttgtctcggggagggtcgaggcataatcccaaggtgctgcggggtccccgtgagaatgaaatgctggccctggcagcctctaagcctcatgcccacagcagcagcagcatcccctccatgtgtcttccccacgcaggagaggcaccaaccgcggggatgcccttgggggaagccaaggaacagacctgcagaaatagttcagcagaggccccaggacaaaggtgtccgctctgtagttcttctggatttggggggggaaagtgataatgatcactgcaaactccatgcctgttttttcttccggtcaacctcttatttatttatttacttatttttgagtcagtgcctcactctgtcacccaagctggaatgcagtggcgcaaatcacggctcattgcggcctcaacctcccaggctcaagctatcctcccacctcagagtctcaagtagctggcactacaggtgtgtaccaccacacctggctaatttttatttgttaacttttttgtagagatggggtctcattatgttgcccaggctggtctcaaactcctgagctcaggcgatccacctgcctcagcctcccaaagtgctgggattacaggtgtgagccacctcgcccagccctgcatctttctttaaggcttagtaaataattgaaattttaatactccaagtgtgcgtgaagaatcccaatatgtattcgcaaattgttgagcagacctgtcctcatgtctgtcagctcaaggttgttaactgtgtcactgagatcttctatgtccttgatgatattttggtcagcttgacctaccagtagtaaaaaaagatgtctcggagcctcccaccaagatgatgaagtcatcttgtccttgtacttttgttaatgtttcctgcatttattttgaagttgtttattggataaagaaatgtttaaaatggaaatgtcttcttggcaaatttcatcttttatcatcatgttatcccgtttctcgtccttaataccacttttggtcctgaagtctattttacccaacagtgacacagggggaccagccctctttctgatagcatttgcctggcatgtctttttttgtccttttctttgcaaccttctgtatccatatgcctacaaagagcatatatctttctacatgaaccatgtaaacccaatctgtcaacatttgtcatttaacaggggtctggtctcttgacattattgtcaccatcgatctaggtagctggttttgaacatgttcatgtgtatggtggcttctcctacctggtccttcctgttgcagagcatacgatatacactgctttgcattacagacttattttagtttgtcacgttttgtctgggtgacaaacagatacacaggcactccgtcctggcttcaggatggaaattctgtgtttctatgtttcttgtctttttttgagacagagtcttgttctgtcactcaggttggagtacagtggcgcaatctcggctcactgcaacctcctcctctcaggttcgagtgattctcttgcctcagcctccccagtagctgggattacaggcgccctccactacacccggctaatttttgtacttttagtagagacggggtttcaccatgttagccaggctggtctcaaactcctgacctcaggtgatccatccgcctcggcctcccaaagtgctgggattacaggcgtgagacaccacgcccagcctctcatcttgtttttgaattgatctctttctcaccccttatattcgaaaagaacatttgcatatttcacatcccagagtgtctactccctcacctcaaattctatcatgctgattttatctagacttttcattctgggtaattattaatatatttgcagccgggggtggtggctcacgcctgtaattcccagcactttgggaggccaaggtgagcggatcaagaggtcaggagtttgagacaagcctggccaacatggcgaaaccccgtctctactaaaaatacaaaaattagctggtcatggtggcgggcacttgtaatcccagctactcgggaggctgagtcaggagaatcgctggaacccaggaggtggaggtggcagtgagccgagattgcgccactgcactccagcctgggcgacagagtgagactctgtctggaagaaaaaaaatatatatatatatatatgatctacagatcatatatatatatgatctacagatcatatatttgtatgatctacagatcatatatttgtatgatctatagatcatatagatcatatatttgtatgatctatagatcatatagatcatatatatgatatagatcatatagatcatatatatgatatagatcatatagatcatatatatgatatagatcatatagatcatatatatgatatagatcatatagatcatatatatgatatagatcatatagatcatatatatgatatagatcatatagatcatatatatgatatagatcatatagatgatatagatcatatagatcatatatatgatatatgatatatatgatatgtatatcatatagatgatatacatgatatatgatatgatatcatatatcatatatcatatcatatatgatatatataataaatattatatataaatatgtatatttgctcttttgctttggttttgattactctttgaagacaatcaaaaatcttaccaagggctggactcagtggcttaagcctataattgtagcactttgggaggccgaggtgggaggattgcgtgagccccatccctcagagtgcaacctccggcttctttgtggggatatttttgttggaccttagacctgcccgtgctgccaggtcccctagcctgccttctcccagcccaggactgatgcaaggggccctggacaaggcataagaaacttcaggaagcatagaaagaggccatgaccatgacccaggaggctaagtgctcctggcagactcaaggttgcccagcagccatctcccttcttccccactaacaggaccccgagtttgttgcagatatttgacaagtgaggtctccaaaggtgccccaccaaccttgcaaggcccacgatggttccagacttagaaatccatcctgttaatccttattgcgcttgccagtgattagtgttaaacaggcatatgactcagtcctgggcatttcgaattaaggaaaagtctgccagagggcttctaggagagacttccctacctggaatgggttgatagggggagagaggggtggagagggagcgagggagtgagaaaaagactggagcaagagagagagaagccaaaagctaaagaagaaagccctgactctccctccttggttgggatgttgtcctttaaggatgtgatgcttggagctgtggcagccatcttgtaaccatgagaaaagaaagcgccactctgaagttgatggagaagaaagacaggaagagcatgggtccttcgtggcattgttgagccactgaaccaactctgcaacctcccagctgcagtcgttgtcttacatagggtgagaaatgtctttattgtttgagccactgacaggctgggtagctgtgatggacagctgaaagtatcctgagagattactgaggaatttgtcctcttgtgtgatcctgcctgctattttaatttaatttttttgagatggagtctcgctctgtcgcccaggctggagtgcagtagcatgatcatggctcactgcagcctctgcctctgggctcaagtgatcctcccagctcagcctcctgagtaactgggattgcaggtgtctgccatcatgcccaggtggggtttttttttttttttttttcattttttgtagagatagggtctccttatgttgccaaggctagtctggaactccggggcttaagcgatcctcccacctcatcttggcctcccaaagtgctgggattacagtcacgagccactgcacccagccattcctgccttttagagtcctgggaggagacaggttatcagaacgcagatcccaggcagtgcggcctgcacataggcagagaagatgacagttgggagttaaggaccctttccccatcacactggccagctcaggggctgagaattccacaagtcagagctttcaccgaaacttgcatgtgacttgtgaaatgcaaacattccagggagaactgggagtgacccgcaccctgtggcttctttcctggaacacttcagcacctgagtgtctcccaggtagcgggaggctggctgtcgagaggacagcatgggagaaaagggattcggaggctttctcagaggaattcattgaatatttgctctgttccagcagctttatccccactatcttttttttattacacaaacatttatttagcacttactatgtgccaagtagtatccaagcactttaaaaatatgtcacactcaatcttgtgacagccatgcgaggtacaagtgctctcactaagcccaagtacagaggtggtggccctggatgtggcccagacagaccagtgccagccccagtgccacgctctgaaccacccagcgtgccaggcagctcttgcagtctcaggctgctgtgtagcagtgacacctccagcgaagtggcaccacttattgccagctccctggacccaagccctccctggttgcctgccctggtgggtcccgagtgggtcagacaaaaggcaagccctgctcctcagcctcccctaggggcatcccccatccccggctctctcccttcttctaagggcagacaggcttctcccaagtgagggcaggaggctccgcacccctttgcaaccccaggcccttgggcggcaagtgtcaagaggaagaaggaatccagagataggtgaaggatgaagacagggcctttatgctcttcgcttctctcctcaaagtgccacctcctgcctctgtctgctctgctctgtccttggtccgtatagcagagccctgctcggggcggcgctgatttcaacacccttgacgttgaactgggctcctcccaggtgtgccaggctggagtcctcacagaactctctcttgctctgtttaaaatggatgtatccccctagcttattcttaacagtcctccagaatcttccaccatgagcatcgtcatccccatttgaccaatgaggaaatgaggctcagagagtgacttgctatccatggccacgcagctcaaatgtcacctgtctgatccaatgcttaccttcagacacaccctgggccctccgggatgatctggagcctgcagacctaggccagcgccaccgtggggtgggggagtggcagcagcctctgtctgctgagactgtgccagtgccaggggtgtacaaacgtgatcatgacctcattacatacacggtattgttactgttatgtccattagcttgttaatctctagaaccaccacatgaagatggtttatataatcaccatcccatttcacagaggaagaaactgaggtaccaagagattgtgtctaatcaaagggtgtccagctctaagcagcagcatgggggtcaaaattctggcccatctgacccctgagctcctggtggtgacaggggcccgggaggtagccaaagcaaggtgttgagaccttaaacccaatgctgcctgtgtcacaattttgccaaaggctaccatctgggaacagtccctagggtggctgtgcccacatcacagcagaggctacttaagggctttgtgggctccaaagcatgagccacatttctcctgaccttgaaatggactctttgagagaggcaggggggggacctggtgtccttgcttcctagctgggacagccagcggactcggaggagctaagagacttgccactgtccacggtgctgcatccccagccttgctgcaccacccagttgcaagcgtgacttctatcaccctgggctgaatttagcttcctaacccctgtatgctaagctgagaattcccttccccttcaatatttctcttcatatctactatccaaaccttgaataaactgaacaaatgagtctctcttctgaggtaaatttgttagagactaaagcaaggttctttgcctagatctaggtaaacatggaggccggaaatgggcttctttctgatctgccactgacatgtgtgaatttctgaaattcacaagccctcttgagtctcagtttcctcatctgtaaaatccaggtgctaacagcagccctaactaagcaggcatagatgatgatcacgtgctcttcagcacctgtggaatgtgtccctcagctggagccacagctcaagtctttactctcctctagtttccaagacgcctgaggtttacaggtagaagacccccagaggacaaagtagctgattccagggattccttggagccaatcctcttggcctcaactatcccctcctatattccctctccccaccggctggggtacgtactccctggccagcctcctggaatgttccactggtccccacctcccagcacagtacccctccctcccgctagtggatgactcactacatttctttcttgctttttttccgattgtgctttttttaagtttaaaaaagaaatgtgtcaaagtcagcatagcacatctatttaaagtgcagaggaagcagcctctgaacaacttgcggtgtggagcctttagaacctttccaggcctcagccccaaagtctgtcactgttgctttctaaagccccaatatgaagggcagtggacgcttagggacgtcaggggagaggtaaggtgagagcaggagaaggcagggcggaggagggtgccctggggatagagtcccggccactgtttcctttgcccaccccatcccccgaggaaggtggcgccagcagatgcaggtatatggctttgtacgtgcatgtcggcttgaacgtggtgtagggaccacgtagggtttcaggcctgagacagcggagggagctgaggaagggaacaggcatcgcttctctctccctcttctgtcatttcatcacccccattttccagttactagattatctcccctaaatagcagcaaagcaggggctgctcccgaaggctgtcagctcctcaaaataggtggaaggaagtcacatggcctcggcactggctcccttcctggctccgcctctcacacatgtccctccagacctgcggtgaaatgaactgcttctcccctctgcctctgccatggctccactgccccctaacctttaaagcagatctctctgggcagggttggcaatacttgtcattcttcccagtgacttgggacaaaagccaaagtctggactccttggtggctccactcccgccccctgcagacgtgttgggtgcagtactgcctcccacgttcgcactggcggttccttgctgcccggcaccgtctcctccagctaaagtgaggctcaggccctcacttccttcaggtcgctgatcacatcttgcccactgagatcttctccagtcatcccagaggacaggccctctgtgctcccaggcctccccacccgttcctctgcttcgttctgcccccgatatgctgcgaaaatcatcactccttgttcattttccggggcggggaggaggaggggtcagtctcacttcctccctcggctgagctgcaggagactcagagatggccttggcctcacccagctgtgctgtccccacccagccggctgctttgacatttaaaggactagtccgatcctgctgggtcgcattcttgagcaactccggcgctgtggccctgcactttctggaggactgagtgttttactcagccttcacctatgaggagcccgtgagacccaggcgagggttgggagggtcaaatccccacctcctgccccaacccatcttgagcctctaccctcttcccccagcatagctgagcaagtgggactggggctggtggaggggtagtgcctgccattcaggggccgaagacagtggctttgctaaggcccctccacccccagccaagcccaggaagccccctgcatcccctccaccgagtgccggcagttcccaggctgcctggcctgtgcccacctgtccccgcgttttctgccgctccacaccccctagtcccggctctggtcactctgcggagcctctgctaaccctgtgctgacagtgagctccccgacccgggctccatcttgacccctcttgcaccgcagacttatttttgactctttgccctactaggcatggagccctttgtgcctcagccagccaagcccagatccagccacgtggacgtgtgctgacagcaccgtcgatgcacagtctccaccaagctgggacaaaggtacacatcctgcgggggcagggcggggcggcagtcaccaccctagcactagggagctctctgctttaggcgatggaaagcccagaatcctttctggtgagattcaggcggcagtgcaaggagccactaagaacggctgcttcatcttctggcgtgaagagctgcgtcagccgcggtgggtgcaatgccctctcaaaaccttctcccagcctgctgggccactttcgctccagatctcttgtggctaatgagggaaaggggagcagggagctgttgcctgcacttccagaaggaggggaggttggggagaggcagagagggccgcctggcctagatggctgtgcctctcttgagcccaggagagactccagtacttacaggaactcaaacgatccctggtgacagctggaggaaattattcacactgtcaagagagaggcttataccacgaacggttccaattcattatttttaaatcccccagctggctaaagagttagaagaaaagatgtgacaatcatttgagtcttgtcccagatgggctgtcactcaagggctatgaaaatcgaatgggactgggctggtggtcacaaaaactgcagggcgcactggcaattctgcagggctttgcaggatggtggaaggtggtctggtgggccatactgggcagcagtggtgatccagcccctatggctcagtagcatttctacccaaagacagaacatgtaattaattgtcctacctccatcccagaggtgggtaccaggatggcttccatgcacctggggtgaggaggggttgcctgcacgcccctcttcactcctgacacacagccttcctcaggggcaaatgtgcctcttgcgtcagctctccagggcagaccctggcgagggcacaggtccttcttttatgggcagaggaaagaaaagcaagcattccagctggagcggacactgagtttcagatgtttggcatttgaacctccttcctgtgttcaggggatccccatgttatgaagtggggacctccactttggaaggcagaattctcaagatgcggcttttttcttttctttgagacagggtcttgttctgtcacccaggctggagtgcagtggtgcaatcacggttcactgcagccttgacttcccaggcttaagtgatcctcccacctcagcctcttgagtagctgggaaaacaggtgtataccactgtgccttgctgattttattttttgtagggagggtttcacattgttgcctaggctggtctctagctcctgggctcgagacctcctgcctaggcctcccaaagcgccaggattacaggcacaagccactacgcctggctggatgctgttttttctaacctctccctcagccgaggcagtatgcttgcctgagaccttgaagtggcagctagtggctgtttaaaatcccttttggtgacaagtagaagcctctacatttagtttccaaaagagcagaggcagtggtcccagtgacagtgcccagcattgggggtgtctgtggtgtaagtcctggggtatgaacctgggagtactggagaatgacatgggatcttggtcctggctagggagccgcttagcctggtgaccatgtgacctatccaatattgtttaataaacttcccacttaacccagccacagttggtttctgttgtttgcaaatgaacttcgagacaatggcagctggtggcacagagattagagccagttactgggatttctctttggcaagtccatcctgggtttgcatctgggaagatctttcacaaaaggagatgtggaaggcacaaccatcccctcgtgcccaattcagatgcagcttaccctttgcagagcctggcaccttggctatgccagctgcaggggaaaggggtggcggccacctgcaagggttgggccaatgctgcacaggattcgggctcaagacaccaacaccctgctaggccagcgcagggaacactcaccacgggagcctaggggcttcctcaggggccttcaagcacaaaaagagatacttttcaccctcccaccccccaaccaggctgtatgcctgcctggccctcagtgggcatggcagaaatgctaggattcgtgttggattcatgcatttttcagaatagtttaaggactgcacgaagacagagggacgaatcacatgacttcagagttcattggttccaactattccagctctcctgagaaggcatgttttgccaaaagtgcacatatgttcctctaaagaaaaccatggtagttttttgatggaattttttcctctcccaggcatcgtcagacgtgcccagcactcgactgcagagcagcctctctcacagtttccactctcatttctcaaagaactctcttggtacctcaaggccgtggctttcctaagtggctttttgagggagacagcagggactgggctttaagggggccacagcgcagctttcttttcccctcacaggcagagctatcagtagccacgtcgggtagaacagaaggcattctgggaacgcggtgctctcacatcctgcaaagtacaggcctgcagagcagatggcagggacttcaaaagctaagtcaccttgaaagataatggcacaaagggcgattgggggtggggtgggtgggaggcttttgtacccttttgcaacaaggaagcagaaaagacaaaagctatttgccagcctggtgcgggaatcaacagaatagagagatggttctgctgcaatttccatcaagggtggccaagcctccagtcttcttgtccagaagtaagtggcatcaaccaactctgccaaactgcatttcctgcctcctgatctggggtcttttccttttcttttttcacacagggagtatttccatcctctctgtccaggcagctgagccttgacaacctctcctccccttcaccatgccccgactgatctcctaatggagccccacccctcgagtccctgggcctgtggaaggtagggtctccccctcctcctcatcctcccccactccactccaggtggggttgcaatagggcttatctggtttcctctaagcatgaagcccttgaccagaggaggagcgggagttcacgtcacgcccccatgcttagtcctggccttttgcattttttgtggatgggtaaactgaggtacatagtggtcaactcatgcccaggatcacagaggcactggcagggtggcaggaatgctgaattcacctgatgagagccagggacagcagcgggtggggcggtggctgcttttcaactgaagttgttaaaaggaatgcttattcctggccccaccggcttgccctccaaggcagaacgtgttaataccgagccccagcaaaggttcaaattgacttcttggctctgagcagggaggtagaagttcctgcccccgccacccccggctcgaggctccaggggctgccaggctcctctcgcctggcctagaaacaatcccctcctgccacctccacgcaggtgctgtcaggacaggccctctgccctcaaacatctgctcctctcctcggggaggggggcctcagctgcgcgctgaaggggccaggcctcagaagcctgttctcctttgaagctgacagcttgatgcctgtggaaatgcggtcctatttcaggatttcattttaaagaggtttcaaaggagtggctggaaggcttggtggaatcgcttattacggctcctctcccggcccgcagcttggtggctgagcacgtcatcatcattggcaggcaggtgactgttctaaattagcacctggctcattctggagggctctaactcttcctgagctttttccaagaacaactttcatgacttataccttcttatacctttcccacgttatctgtttgaaatgatccacggggcaggtgaattacgtgtcatctccaagactcttgtttctgtcgggcatgtcttaaagacacacacacatgcaaaggctatgaaaatgcgaccccccagacctgggaagctgcagcccgtggagcctcaggggcaaagggagcaaactggcttgtgagggaagagctgctctggtcagcggctgttgtgggatggggagggaacagggtgacccaagggggcaggggcctggtgccatgtctgctcatgtgccgccctccttgtctctgggatctgcccccaaaatgcaagaaacgcgtaagcccactgtagcagatatggagagactccgggggattttcctttacctaactactctgcacctctgcaagggagagcattatggtttggaagaaatggaaacggcatggaagtcccatgtgggcagagcctgcacaccaaacccttctagactgcaaagggtttgactcagcccaaagaggactctgccaggaagctgtcaggcacctgaggccacctgcctctcctccgcttcaggaataaccatcagtactgcatcttggctctgaggggcactgggcatcacgatgcccactcgaagcagctagggcacgttgatctctgcatctccatacagatgtccgaggaaatgatcccatagcctcatctctgtttcagaggcagaggcagagtccaccataatctagcccattgctctcaaccagacagagcgcacctcctggccactaggtgagcatttgtctttcaaggtttattatttacagaaactgttttcccattggttttgtttccttcccccaaggtaagacaatgcccggagagaaactccattgctagggcattggcaaaagatttgccagaccctgacacctgactcaaccttgctctcctccaatcggtgcctccaactgcacccacccaagagagtgaagaccaaagtgcttctaccaagagggtacaggttcctagcctggctctatttttcagagggaagcattgtttctgcggggacatgcctgttcacttccatggcactgctgacttgtgctcaccctatgacgcctcgcccagagcacaggaggacagtatccactgcggggcgttcaccccacgcgagcggggacaacaggtctagccctaaacaactgcttgcctggctataagaggagccttgtctttttttttttttttttctagattccagaagatgcagtatttttcctaaggcaggagaaaaccctagttcatagacagccaggataaaaaccctggaagaccatgagccaaggtgaacgaagaggaattttctaaatcttggggacagagaattatgttacatcaaggcagccatgccaataaaatggaaggctatgaaagcaagcaaggcacaagaaaacccccattccacagagagacacaagtgttctatttggtgaagagtttggtgcacagacagactgcatcctgtgaagaggtggcccttgtcaaggctactgccgccaggaggatctttgcatctttaggatgtgtcactagctcatcgaaactatttctgtaactctctgcaagagccaatttaagctggcgtctcagttccctctgcactcaaaagagaccaatttccaattcctcctcagagtccgtgagaccagatgctacagcaaatgttccagagaaatgaacctagaaaatgatcccggggtgctccttgcgggggaacacaggactcctcagctctatctctgtggctttaacatacatcagtttcagggtgagtgctaccattgccccccgagagtgtttctgatgggacatgctttcctgatagcacaggggatcttgggggacagaaggttcccagtaaggctagggggcacgtgacagattgagagtgtgatcatgtttccaggtgagaccctattgcatctggcagcccgaattgggcaacaattcctgcaaataagaagccactgctcttgttaggtaggtcatcgtcccataagccccactcggagcgctgtcataaaagaagtggcagattcctgtggcttggtctttctccagggtgtccatggcaccaattgacacctgcagtaggaaagggcagaggggacaataagcggagcccccactccccgtcacgcttctgcgtggtggtggcagcgggtcaacatgggcaggggtgagggttgctctagtagagccttggccttctgagaggctccaattctgagggcatgagggcacgaagccagcgctgccagggggaatgccctacctctctgggcactgcactctgttatcacgcaccctagtttgtagctcctgactataatgaggactactctgttgaacttgactttgtgtacagggtaaggggttcacccatggtcacatgtgttgcaagtggtggtgtttggacgaaaacctgcattgagacaggcctatccatccccaaaggtcttgagatttcccaagtggccactgtaccattttctaagcaagtggttgacattttttccccatcatctgtgatgacattttcttggttcgagtatattctttcctattggacacagaatctccagcctcaacagagataaatgccagccaacccagctccctggcacccccacctggtcctgcaagaacagctgactggccatctgcacgatctggtccacgtggatgatgcccccgatgctggtcatctccgtgtccgagagcagcgtcagcaccatgatggcttccaccagcagctgccggtactcgggctgcggcacgcggttcagcaccgattcgacatggacagcaaacttgatctcatgcggggtcatctaccaaagggacaggcaggcaaccaccagtgagaggacagatgcagccctatcaatcaatcaccgagtaaccaagggtgaccgtagcagtgcctgggctcggggctcagcgccactgctgccccttttctggccactccctggatcctgctggcagtggccctcagagcaggaggctggagtatgcctccaggagccagcctgtcctcgcctgatttatctacccttccccccatcgactacagcttccagggagcagggaccatttctggtttctctttcctcttcattattccttccagcatgaagcatggtgctttgggtggggtaaaactaaaaaaaaatccatgttaaaaagaatgacaaatcacctagggacgattactgtttttagttggagaaaagggccgagaaggctgcccatggggcaggccagggtggcatggagattggctcctttctttcaccagggttctaaggggtgtctggcaaatgcaaagagcttgctagcccagaaatgctgagtctcaggtgaagaaaaaggctgatgccaataaatgctggaaagacatttttgccaaatatgagggtgaaggggctagacagctcagagctacaaatggcctgtcaattagaatgagcccaaaaggagcacaagaggtcagagtccatgcaatgaagcccttattgtgaacccacagaggggcccgcctctgcgtttttctcatcgtacctctcgggtcgtcgaggatgggaggacataaccatcgatggagagaccgtggcactggaggcagaatagagcgcatttcagtcagattccagaatgggataagcacatgcatgcacacacaggcgtgcatgcacacacagcaccctctgccctggaaacccatatgagggctgggacacgccagactgtcagagttatttttagagagcttgttctcactgcccacaggctgtgttttcgatggaacaattctagggaacccagcaggcatctttcagatctcccccgaacaatgccctagggggctgccgagtcctcccgggaggctccgcattgtacttggcaactgggcccgggcggctgcgaggcccctttggtgccataataaagggggattttcatggctcctgctggggaagggatgcttctgtgcctttgcaggcatctatttttgagatttctataataagcaccaatcacaaaagcctccagcacatgcacagacatgcacatgcacacccatgtatataaatatcgagtgccagctcaacacaaaatgctttttcataatagaaatatcttggtattgcgccagtgagtccgagcggaagcatgtgatgccccaggaagagtggggaaattttctaggaacagcttgttctagtctaactggccaccttctaaatcccagcaccccggcctggagcgtccccagtgggctgagggcagaacagcagtggacactcccacccccttaagagaggcgggaagtggagcaagcaccatgagcccctgcaggatcctgcctgggtcccaggagtccagctgctcgggcagggcctgctccgacctcctcacatccctctgcggtggccgtgaggaataccttggggcccatgaagcacaggggcccctgttacagaaagaaccttgagcaagtggtgccatggctttgggaagggggctgttgtatgctgtcactgggattattttttctcttctctcccactgtgaaatgaactaaaaaatagttctggggggaaaaaaatgtcttggtttgcacagcttttaagcgaggcacactgtccttccattcaagggaaaagacagggagggcctggtgcagcccagggagctgcataaactctctcgggctgatgcagaagggagacactgggggggtacagagaatgctgcccccctccttgacaacaggcgctcagggaggtgctcctgtgctcaggtacaggcaccacagttcccagggacaacagctggggagacgtgaacggccccaggcagatgggaagcgcaacagccggctggctgaggggagtggggccccagggtgtgagggagattgtgccttcagggcacacaggacctggggctaaactggaagctctccacctctgtacaccttgggactgaacacggcaggtaccctgggagggtggggctcagtcacatcgctgaacagcagggacactactcctgcctggatgtgcgggaggctggggggctggcctactccaggcccctcctgaactgtcattccaggttccaggcctgtaggtgctgctctgggtggttttacagggttttcatctgaagcctcccagcctttccctgttcttctatgttcctaaaatacgtccaagttggtcccacacaaccacaacctagactgccaccttgtcttacttgctgtggttctcaactgggttgatctgcctcccacgggatgtttgataatgcctggagacacttttagttgtcacacgggggtggggtggggagaagagatggctgctggcatctggcgggtagaggccagggatgctgtagacatcctaccacgcacaggccccctagcagagaatgcctcggccccaggtgccaacagcgctgaggcagagaagccatcctcagggctgtgtgtttgctcgcctggaggtgccaccatgccttgccaggacagtaaggggacggttcacttccccaggagctcgcgtctcggcttaccttctggaggatcttccacaccctctggtagaatcccacggggaccctgttgatggccccatccagccttctcctgcgcagccactggccctgccgctcaccccagccgatgtgatgtcctcccgagtctgaggatgacgtgccagtgggcgaggatggggtgctggacctctgcaagacagacagcttggggcctcagaagccacgcagcaggtgccccagggaaagtgcgccatctcgaagggcggccctgcgacctaggcacaaatgccagaacaccactcgccagagaggaacacggttcctccagtccaccttgtctgtttcctcatgtgagatgactcgcatactttgggttgatcacttcattccatgttgcactctgccctgccccccgagaggcagtcccacccccaaagctagaacccataaggaggaggccgaacagggcgagcacgggcttgggggtcagactgccggagtgctaatccccactcaatgccagcggtgccaaggacacacccgaggccgtctggccctgccatgaacactgattctgggcctcagtctcatctgcacagtggggacacagtcaggcatcctataaagagctgcccggaagccttcaccacgtggagacacagaagcccctgaggcatacctagtgtgcgctaagtgcccatgaggggcagctgtcacccgcacgtggcgcctgtgccactgcagtgggagagctttgagggtgacaacgggccctcggagcaggcatccatggctcagggagacaaactccatagtgcccacttcattgctgcagtgccacagagaagtgacagacacgtttccacaggacaggaaccacagagaaggcaatacatgacacgggggaagacaaacagtgaagcccgcgtttagtggcgaggacctcgcagatcagggtccatccacccaccctttgcaatcccatttccggctttccctattcttggcactgggctttatcttaatttggggcaatggctgcctctgaactggggctgactttgctgaagtgagggaagagggcgccatctccttcccacctcaacattggctggactgattcaggctccagagggggacactgtctgagaggctccccaccgctggcggggcgggcctctgtgagtgggggcgcatcccctccctgcggcaaagctcccagccttctgtcttgccctgcggggcttctagcttcgagacctccaggtcgagaagggataaccttcactctcacacatctctttgcctgggactatctggcacttttgtttctcgatagtgccacacatcaaatgtgcacagtcaaatgtaaagggttaaagtgaaatcctgaagtgtgctagcagggcaggaggtggagctctcctttctgcagcagttggatttcaacagatcttattttgaaaaggcagttcggctgggttattccattgggctcattactgccacttaaggcaacaattagacacaaataaaagtaattacagctgcactcctcaatgactcagctgatccgggccctccagtttcaggaggaagattcagcctctgctctgcggtgagctcaatccgagccctgcacgagatctggggcatggcaggtgcagagtgctagttggcacatgtgggcaagggctcaccatcctggctccataaagaggcatggaactaatgccccgaagtttccagaagctctgggaattggtgagaaggaaactcctcacccacactgtgccaaggagcacaggcagagaactgagagcttaagacggagaacaaagctcagggcaagcactttggggccttctttctaccctcctcagaattccagttggaggagcctgtgagcatcccgctgaaaacacttcagccctgctcgaatcctcagaagttgggcatgaggtgggagcatgaggaaggacgcgaggaggagcggggacggacacaataatcccgaggcactgttaccgcagacttggaggaatgcgcactgctggacgcggcctggcccacagaaaagaactacaaaacaaaaagaatccactcagttgacagcaatgacaccaagagacacagcagagaggagggtcatggagcagcatccgaaacacccacagaaagcagcagcagagaatgcgggcgcagagaaggtgccacagcaacgcacataggcaagctcaggtgcaggggcacctgcaagcaccgctctgggcttcgactccacgtgaaacttactaactgctctttttaaaaacatgaactgttaccattgaatgtaaacattaaatgttcctgtcatatgtggagggtgcatcatcaagttaggacactatttattttccaaactcacagccatgaaatgctcacattttatggtaagaattgtgaaaatctacagatgaaccaaatacctacagctgacactaacatgctgcacctaacattcagtagatattcattaaatgaatgaatatgatgatcgggctgatacctttggccacataagtatttcctcgtctaaaatctagaatgtacccttaatttgcaagggtacagtgtgctatctacaaggtattcttacaaaagagactagagattgaaaataccataacacctattacatttttggaacaaataatatgttccttgacgtaagtggtcaaagtttgtactagctaggtgactctaagcccagcaaagaacagaggtgatcacttcatccccgtaacacgcaagaacagcatgaaatagaggcggaaggaaccactcagattcacccacggtcaggccatcgggatgcggggacagagggacggtgccaccgagtggctggcaagggaagatgtttgaaaaggcagttccctacttggaaacagcataaactaggagagataaagcatgttttacctctgggcaacatgtggaatcggcctttacatgtcattaagatgtctctaggctcttgtggtaatacacatcaaaatattagaaatgcgactccagtgtcccagaggggggtggagaacatatgtcaccagggtgatataaaagaagagcacccttacatgtttttccttccagggttaagtccccccaggcgatctgaggacaggaatagcagcattctttctactgatataaccaatgaccgcatttcccccccatttagttttctatttagttccctctttttgaatagaaactcccactgaggcagagcctggatgatctctttcacaaagtaccctacaaagcccaagagtttgagaaacagattatttttaaaggcatggggcaaggtcgtctctcctgccctcgagtcctgctctctgcctgtgccccagcccgtttgctggatagagccgccctctacacattcacacgctgcggagtcacagcctcactttccacattcaagccagaaagaacaggaagtaaaggacgaacaaggcaaaggggtgtcacctgttcatcagcactaaaccgcctagtcatctgaaagcaaaaatacatcaggaaatcaaaaccagctttgagccaagaacgcgtgcttcttctattgccctctctcttaatccagggccgtgttggtcaaaccgcagggggtgacccatgagtgcatcatggactccatttagtgggtcatgaacagcatttaaaatggagcagaaaattcgagtgcatttctcatggtcagagggaaactctttcccagcatggatcctgggcaaggcctagcacagcacccagcacgttaagactccgatgttgagctgtggccctgtgcggtcagttcaaaaggattttttttttttttttttttaccaggaattaaaggtgaactaagaaaagagacccctgtggctggtggagaatccaagtatcatgggcattctggtctatttccagagccctcttgctatttcgtttgaaggacacagatgattcggtgactttttgcatgactctactttttcaatggctgtggcccactcctaagagtggttctcgggaacagaggcaaacatggacaagggtattttctggaacgttcatgagaacatcacgttaaggttaaggatgagtgggtaagggtgcgcatgaccggctctggaatatctatctggggacaggggtgtgttcagatcccagacagaagggacctcccactctacagacagtgggctgcagcctcatgccctaggtttctgtcgctttctggggtaagcccaggtagggagaccaccactcatccctcgctgccactgaggtgttcttacctgtttcatttcactcctcagtctgttaatgccactcctctcagttttggtgactccggtatggcccacctcgtggatggagatggtagggctggatgtggaggagtggatagggcgcactgggtgggaaacacacacacgtggttctcaggaactctacagcatccaacccgaggcaggatctgcccctgtctcccccacttgacaatgagggccttctctgcctggccagcgctgtgtctccagcaccgagagcagcacaggtgcagcactcagctcttaaaggagtaaacggaagtgtgcagagtacttaagcaccattataacacagtggccaggaagccccgacacagtgagatatgttttttttttttccgagacggagtctcactctgtcgcccaggctggactgcagtggcatgatctcggctcactgcaacctccacttcctgggttcaagacattctcctgcctcagcctcccgagtaactgggattacatgcgcccgccatcacgcccggctaatttttgtatttttagtagaggcagggtttcaccatattggccaggctggtctcaaactcctgaccttgtgatccgcccaccttgacctcccaaagtgctgggattacaggcgtgagccactgcaaccagccatgtttttttattttttttgagacagagtcttgctctgttcccgaggctggagtgtgcgatcttggctcactgcaacctctgcctcctgggctcaggcgatccttccgcttcagcctcccaagtagctaggaccacaggtgtgcgccaccatacctggctaattttttgtatgttttgtgaagacagggttttgccatgttgcccaggctggtcttgagctcctgggctcaagcgatctgcccgcctcagcctcccaaagtgctgggattacaggcatgaaccaccgtgcccacccttgcttttggataagtaaaaaattattctaataaaacatacccggccaggcgcggtggctcacacctgtaattccagcactttgggaggccgaggcgggcagatcacctgaggccgggatttcgagaccagcctgaccaacatggaaaaaccctgtctctactaaaaaaacaaaattagctgggcgtggtggcacatgcctgtaatcccagctactcgggaggctgaggcaggagaattgcttgaacctgggagatggaggttgcgatgagctgagatcgtgccattgcaccccagcctgggcaacaagagccaaactccgtctcaaaaaatacacaaacaaacaaaaaacatacccgaggccaggcacggtggctcacacctgtaatcccagcactttgggaggccgaggtgggaagactgcttgagcccaggagttcaagaccagcctgggcagcatggtgagacctcgtatctatatttaattagaaataaataaataaacaaaaatttaaaaaaaacccaaagcacaccttccttgtagaaaactgagaccactgaactacagaagctagaactaacatctcttgatattttagtcatgattcttccagtttttttccctatgactgtgtatgtttttaactaacaaaacagtaccatcacatacatacgtatagatacagaaacatgagatggatacatacattctgtggtatggttctgtgacctgcctttttgtacttgtatcgtgaatgtctctccctggcattaaatattctatcacatcatgtttcatgaccgcatggagtttgatctggtgagtgttgactggtcaacaatatacccaatcctatttgtattaatatttttctaaagggttcgtcatgactaatgtgtaggacccacatggaccttgctgggctctgtccccagtcccgtgtgactctcggaatgcccctggaaaatgacaaaactgctgtgggcccgaggggctggcaccccgggcagctgtggccgtgggctggatgatccagagggcctcctggtgccaggccctgtctgggcagcagatgcaggtgtgaatgcaggagaattcagtgccacagcggggtctggaggagagcccatgcccaggcctgagggcaaggtgccaaatgaaatgaaggtggcagctggagaagggcctcgggctggagggggaagtgctaggaaagccaggctgccaggggctggaggtggaggcaaccagaggccactgatgcactgcaccaggccaccacctctcactcccaacctatcgcaccagcctcggggctcaaaccggtccctagccccaccacccacaagcctggcctctgtgctgtggtaacagcaatcattctaaaaggcaagtgtgatcgtatcactgcccactccaaagcctcccaggtctagctgtcttcaggacaaaggccaaacagtcctcccagcatcacctgaaactctaccaactcgagccctacctcccctcaactcccggccacctgcaccgcactgggcatctgcctgtgctggaaggccaggcccagctcaaaggtcacctcctcgggcagcatcccctgcaagcctcaccatcccacctgaccccaatggagccatgggagtggagggcactgtgcaggaggagtagtgacaaataaggaacttggggacaagaacatttaaaggacagcagagaggcaggagcccataagggagactcagtgatgagctggggagggaggacagacccaggaaagtggaaaacagaaggagaagggtctggaagctacaagaggggctgtctggggtgggtgttcgctggaaacatttatctcagacatctcaggatttaatcaaaattctaagcctatttgggcttcctaatttacaaaaattgagcaattacaaaggacagctaacaaatgatgttatatgttaaaaagacagcatgtcttctgctcttgcttgcaatcgcacatatttatgactttcaaatgacattactcagttcctagtttcatagcatctatagctgtacatctaatgacaaatttttagtaattatctgtgtcaagccatgaatactataatgatgagcagaacacattaaatatttatctcgtacattaccatttcaaggactctgccttggaaagaactggaaattacttttgcaaaagcattctgagcacccctccttcgggaaaggagaaaaaccaccaaaacacatctgactgcacgatgctgtctttgtttgcagccagcacatgctcaggaaacatacaaagtacccaatgtccttcttattaaataataaaggaatgatagcccacagtgcatttctttggcttgatgaaataaattcaccaacgtgcctgcaaatcatttagcttttttatgaggaggagaaatgataattgcttcaattataattagggaacatttgagaacaagaatcacgccaggacttgggtgattatgtttcccagcactgcaagcagggttccggttcagataaaaacagagtgagcgaggcaggacaaagcaaaataagttagctcgagcatgctgaggtcacagaggggtctcctccctgccctgtggagggtgatgtgaggccgggttgagaatgtttttacccaaaccaaagggcaggatgctcaggtggtgtgaaaggacagccctttcaccctggcattcggggtcccccacacttctaacacttttttttgagaacagagttttgctctgtcgcccaggctggagcgcagtggcgcgatctcagctcactgtaacctccacctcccgggttgaagcaattctcctgcctcagcctcctgagtacctgggattacaggcgcgcgccaccacgcctgactaattttttttgtatttttagtagtgacggggtttcaccacgttggtcaggctggtctcaaactcctgacctcgtcatccgcccacctcagcctcccaaagtgctgggattacaggcgttagccaccgagcccagccaacacttttgcgtaagtgatggtgccaggtgcttacgactacaggaggcggtataccacacccacatgctgtgccaacctgggcaagaaaagctcgcccagcacactgcgagcaagtctcaaagcccccaaagcaggaagcttgagcctaggactctgtccatctccttcaggtaggagccttctcttcccacattcgctatgccccacagtgctggttctaatgtctgctgcatgtaaaggaggcagctccctgaagacgttaacaggagcatggaacttaccacttctttcaacgccaaactctttcccacttagaatatggtgcaggagatttttcatatcgaaagggctgaggttcatcaaactttcagaagcctcttctcctaaaaacaaatatcttgtaagtgtcccaaacacagggctggtggcgggtaaaggtagggtcaggtggacgtgggtggggagggaggtgatagcagatgccatggcaggtccccctgttcaggagaacctcactattgctttggggctgaaatgcactgttccgtggggattctaaatgctgccgtttaaatcatgtatctgcttaattcttagacacatgatgtttcacaatgtatgatccccaacgttggatgtctcatgatggatttttatattcaaattggtagggtttctcccagtgaaggtgttataaaatgggggtgacatctcatagcaagggcatccaggaaggagcttagatgtcgggtacagggcggaagattccacatcgcctttgaggctataatggtaaacatcaccagagccccattctccctgacttatgaacttcagctctatgccgcatggatgggagttccatctaaatgagagaagctggtaaggcctgagcttgccacaggcttggatgctgggttcgagataacctaagcagttcttcccctgagagtggaggccgtggccgggtggttggggtggggtgcggcgggagctgcaggagctgcgggcatctcacctgagcagttcaggctccgtgccagctccgtggccatcacctgaatgatcagtccaatccggagtctcagcatctccacaaagaggctgggctgcgccctgacatacatggccaggtaaaccacaatctcctgaggcagacacacacggagatagggtttcagagacagggtgagtggctgaagggtcccctccactctgaggaaggctgtggcccgacccctcccacaccagccccagacctgcgtgaggacggcaatgctgatgtcctgcccactggcctcgtagatgagttttgtgagctcctctgggggaaggggcctagaaaggagcattgtgtcacgaatgtgatgaggtgtcttgagacagtgcctcctcgccctccatggaacacccttattttctgtgctagacgcatccatgtgacagagtgtctttaaaaagcccctcctccgaacactgggaagcgctgttttccccatggctcccccgcaaacctgaggtccccaaggctgaggacttacgcagagatgatcttctcccggggctcgggcggcaggcccacggtgagctgcttctggtgcgaaagcaggtctgtgcaggcctgcgcagttaaggggaagggtgagaggcagagcgcgagagagatactggcaaagacgacagacaggcagtggggaggagacactgccaatcagatcgtacatttacctttacaaacttagtgacccatgttgcccttgatctgaaaaattcatacctagaccccagactaagcaacccagacagggatgggtgtctgtggtctctgtctccaatgtgtggccccaagcctggctccgaagggcccgtcagtgggcgtttaatgcccatccactagcaaacacattggactccctgctattgagtgagacagggatgagtccgaagataccgatggtaagagttaataaccatattcaattcctaagttacccgtttccccattattcacatctaataaatgccatcatcttaccatcatgacactgaactcgagtgtcttagaaagcagctctggattttgcctggccttggggttataaatattaatgatcactgtactgtggatgtgtgaaaaaaagagagctctaagaggctgccaggccacagagcactttcatttgatttcctggcgagactttttccgtagccaagaaagaacaaaaccaatccacttgcatttccttccctctgctcgccttcctggagcagcaggcaggcaggagagaagggcccgctccacctgtgggttaaagaatggggctccttcacaagtaagaggtataactgggagattggaagtggaagaggaagggggcacgagctagtgagcacacatgggcagcctgcacagtcgcactgacctcagccaggacctccactttcttcctgagaaggcctgagatgtagcgaatcagaccccactcctggttcaagccggctttcccatagagctcaccaagaaggttttgaacggtgaccccgtgctgtccagagagatttgtgtcccagctgggacccctgccaagaggtagaaaaacccagaaatatggtccagaaagtttagactgggagaggaatggatcactgtgcattttgcacagcacttgggctctcccagtgcccctgagtctcactgagagggttacgcccgaccaaagcttccctatgtcctttgaaacagaagcctaacatcaggacgtggtggcctcctggcctcacatagccttctcatgctgggggaccagcatcagtaggcagagaaggggatggaagtctcattcctggtgatcctgggtaactggggtgaatataatcatgacctgggctggctagaaggccaagaatactacggaaaaaattaaggagaactgagaaagcttagcctagtaaagaccataaacttactgctacggcttgaatgtctgttttcccccaattcctatgttgaaatcttaacccccacaatgatgacattaggaggtggggactttgggaggtcatcaggtcagagggcagagccctcctgaaggaaatgagtgcccttataaaaacaatgccagagagctcactcgccccttccaccatgtcaggatgcaatgagaagatgccatctatgagaaaacaggccttcccagacatcaaatcggccttgagtttcaacttcccagcctccggaactgtgagaaattcatttctgttgttcctaagccaatctgttcatggtattttgttataactgcccgaatggactcagacacttactttatgacataaagaatgtacagaatgtctgcttggtcctgtaggttcgaacaatcttttagctgctcaaccagcttctcacagtccacgtcaccatggtcatctctgggccactgaaagtcactttcaggaacctgttcatacaagagccagaaagcagggagatgggctaggcatggaactttcggaagatcaagaagtgaaacaccaatctggtcttggaactctattgctgtgctgtgctccagttttcaatgactttttgtacctctttatttataggcttttactatttttgatcagtgaatcactgtgctggtcaacatttgcaagagactggactgaataggttaaaatatatgtgagttttatttatggaaggttcacagaccagtagaactaacctctggtgttaggaatcatgacagcagttatctctggaccagaaaaggagaaagagatgggaggggggcacagaaggtggtcattgatccaggtatactggcttggtgatcattcattgagctgaaggtgtgaaggatgtgctatccccaaatatgccagattggtatattgacaattttgagttgaaaacattggaaaaattgtagtttcagaaaggggtagctgacctgtctctttctgcaggcagcaagccataaggatgcctctgggaggggtacactcctagggcgtgaaaatagcccatatcaccagagcccaggaactgggggcggcaatggacctgtataaatacacttacccaaggaaaccttatcttccactagttttacacaccctgtgtatatatctcctagtaactgcctctagccagattttccttgtcctgtcctagcttctcaaatttatcactctttgtttaaaaagtaggaaagcatcttgctttgaccacttcttcagacttcactctcttgtgaagatccccatgtacccagacagctaatcacctttgtatgctttttcttgcagatgcctggtgtcaagcggcttctagacggagccgaaaagccctcacaagagctaaggaggggttggaggtgacctctcgcttctctattcctgctttctgcaccatgctgcatatatggtatagttatttggaagcaaaacaaacgcaaaaaggatgtaaacaacctaaaattgaaatcagggtaaaatcttctccaacaggcactgagtgtgccactgagtctgttcgtgtggggtagaatcagggaagagtcctggataaaataacaaattgtgggaattaatggaacaggctgagattttattctcctgagcaatcttatttttaaaatttttttatgcccatctttttcctgcagtatcctaaggaatcttttactgttttttcttacattaagagcattaggagccaggtgcagtggcttgcgcctgtaatcccagcactttgggaggctaaggtgagaggatcgcttgagcccaggaattccagaccagtctgggcaacatggtaaaaccctgtctctacaaaaaatacaaaaattagctgggcatggtggcgcacgctggtagtcccaactatttgggaagctgaggtgggaggattgcctgagcctggaggttgaggctgcagtgagctgtgatcacaccactgcactccagcctgggtgacagagcgagactctaagaaaaatttaaaaaggccattaggaacaaagagtcctgtactctgttccccaagtagtcccaccttggctggctaaacagttaggcggggttaggtagtgagctttttcctctagtggctacatagactctgatgagtaggcagcaaggtagtagctttttctacaggcaaaatgtaaaggtttgcatcaaattcaatgtacatattgatgcaagtcagattccagacaacgaagtgattgggttcacacccaagcccagagcttctaaactgaaaggtccctgatatcgagaaatatgctgtttcttttgagtttagccatttggaagagtttggggactcatcctgcattgtagaacaccatacttttaaaaaaagctgttccatatactttaccttttctaggagtggctgaggagaatcaacaagattcagtgatttacggtgggcacttagaactttagtcggcaaagtcatgggaacaactggaaaacaaaagaataaagagagttattctgaggaggaagaacaacactttttttttttttgagacagaatctcactctgtcacccaggctggagtgcactggtgtgatctcgcctcactgcaacctttgcctcccgggttcaagcgattctcctgcctcagcctcccgagtagctgggataacaggcacgtgccaccacgcccagctaattttttttttttttttttgagacagagtttccctcttgttgctcaggttggagtgcgatggcgagatcttggctcaccgcaacctccacctcccaggttcaagtgattctcctgcctcggcctcccaaatagctgggattataggcatgtgccaccacgcctggctaattttgtatctttagtagggacggaatttcgccatgttggtcaggctgatctcgaactcccgacctcaggtgatctgcccacctcagcctcccaaagtgctgggaatacaggcatgagccactaggcccagcctaatttttatatttttagtagagacagggttttgccatgttggtcaggctggtcttgaactcctgacctcaggtgatacagccgtctcagcctcccaaagtgctgggattataggcttgagccaccgttcccggccaatacttcttttgagaagtatggcggctgctccttatctaacacaaaccaacagaaggaaagatcacttatttagtttagcttcaacaagaatttatcatgtagccacctcatgtgctaaatctgggaataagaagtgagcaggcatagatcttgctttgagaactggatttcgcttttccctcctggaattcaggaaaaatgatacaacatcccaggactggaaagaagctcagaagtgatttcgcctgacctctttttctttcggatgaggaaactgagagacccagagagggcagaccatttgtccaaggtcacttcccataaccaaggtgtcttggcttccggtccagtatgcacttcactctgccactgctgggcagtagggcttgtttttcaaccacctctggatattatcattattgatatttattcattaagccatccctgtcttccaggctatatcatgtcatctcaggagaacaagaagttttcaaggtaaagatgatgcatatttaaaaggcatttatagacctccaggttatatttgtgaattgaatacacactgtaattttaattccttccaaccctccactaacattacagaaaatatatacagtcatgcattgtttaatgacagggatacattctgagaaatgtgtcattaggcaaattcctcactgcatgaacagcatagagtgtacttacacaaacctagatggtacagcctactacacacctaggttggatgatagaggctattgctcctaggctacaaacctgtatccatgttcctgtactgaatactgtaggtaactgtaacacaatagtatttgtgtgtctaaacatagaaaaggtatggtagaaagatggtataggccaggcatggtggctcatgcctgtaatcccagcactttgggaggctgaggtgagaggatttcttgagctcaggagttcaagactggcctgggcaacatagtgagacctcatccctactaaaattaaaaaaaaaaaaaaatggtaggccaggcgtggtggctcacacctgtaatcccagcactttggcaggctgaggcggaaggatcacctgaggtcgggagttcaagatc

SEQ ID NO: 58943 - DNA, 558 bp, Homo Sapiens
tttttttttggttacaggttttactgtcttacagtgtgaataccccatgaaatcgtagaactctttgcaacttatgtcacacctgtatcttcaagggcaaggattatttgttgctatagtttttatgtcactaaagtaccttttagtgtcatatacatagtagataacactggataataataataaaaaagactaagaatgctaaagtagtctaggaattcctaaatcttaataaaaactgagaaataaagttgtgatactatataacacttaaggcacgagtaatttttttttcaccgtttcccctccatggctatgaaggaactgggagaaggatgctcctttcattaattaaaattcttcactttgaaaatttaagtttattagggaaggaaggaagaaaaatatgaagatgtaagtatacataccttggagtaagtatttccttatattggagtttctctaatttagctggggctactaatgacatgggaatcacaatgttatctatgtcataagagctctcacttctcaatctccgtcgtgcagtattctgca

SEQ ID NO: 58944 - DNA, 571 bp, Homo Sapiens
  misc_feature (433)..(433): n is a, c, g, or t
  misc_feature (500)..(500): n is a, c, g, or t
  misc_feature (525)..(525): n is a, c, g, or t
  misc_feature (543)..(543): n is a, c, g, or t
  misc_feature (562)..(562): n is a, c, g, or t
  misc_feature (564)..(564): n is a, c, g, or t
aatgaaaaacaccaatttattatacttatgatactgtttaccaggacctgagcaggctacataggagttctcaccatgatagccaaaccttaagctaaataaatacacaagcatgtgttacttatcaatctgaaatacttcttatttaatctatgtaatataaaaatcatagtaattctttttattgaatataacaagaaaatatacagtacacatacagttcaaagaattatcaaaaaacgaacacacctgtgtaatctggttaactacttcaagaatcagaacattatcagctccccagaaacctccctcatattcactcctagtcactacctccttcctcaaaagcagccactatcctgacttctaaaaccagagactgggtcatgcctagttttcagtttcatattaatggaatcataatatgtgttgnatggcttcttttgtcaacattataagattcacttacaatggtatacatagctgtaatccggtactgntataaggcaggctacatctacaacntaaggcttttaacaatgnactgggtggtctacattangntatccca

SEQ ID NO: 58945 - DNA, 477 bp, Homo Sapiens
  misc_feature (2)..(2): n is a, c, g, or t
  misc_feature (389)..(389): n is a, c, g, or t
  misc_feature (414)..(414): n is a, c, g, or t
  misc_feature (440)..(440): n is a, c, g, or t
  misc_feature (455)..(455): n is a, c, g, or t
  misc_feature (461)..(461): n is a, c, g, or t
antatagcctggattgtaaccagattttcttttttcccccttctcagctgtagatatgatatctcctttcagggccccagcttaagggcaaagtgagttaatgtgtagacaaaggcgagggacaagagagagttaacatctagacagtggaaaaagccatggtgtgtggtttctgggaaccaccaacacttgcaggtttagctttttcccagggttgactacaagaaagaaaaccatgtttttgcaagattaaaatgtggttgagtgtgcctaaattaaccatccccatttttatcatatttccaccatcacttcagggttttaagagtcagtgctcacctggggcggactgggtaggtacattttgcttcttaggaaagctaagtccnggggttcccgtctgattttagggtnccggggacttcccgaggaacacccgntcgcagaggggtaantttctnggagtttgttttgcag

SEQ ID NO: 58946 - DNA, 455 bp, Homo Sapiens
aaacaaatccacaaggaaaattctatgttctggattctagctcttgtacatttatcagaatgtactatgctcactccaataagcaactagagggcagactgtatattttacactattgtttgcccaaggccaagtacagagcctattctttattagcaatttggtaaacatttattcaactgaaatgtttaatttatcccattgctcatggttttcctctttccagcaaacactaagaacagtcagttttcttcctttcattcatccatcaaatctgattgggataagttctatgctcactttctaattaagcagtcaccaacctttttggcaccagggactggctttgtgaaagacagtttttccatgaatgggaagggagctggggagagatggtttcgaaatcaaactgttacacctcagatcatcaggcatcagattctcataaggaatga

SEQ ID NO: 58947 - DNA, 1712 bp, Homo Sapiens; identical to SEQ ID NO: 23430

SEQ ID NO: 58948 - DNA, 410 bp, Homo Sapiens
ttttttttttttatagttgaaattcactttaatgatacttttgaaacccaatatatctaaaatattatttcaacacataatcaatataaaaattaaggtatttaaagttgttgtcctcttccatgcttcatacctggtgtttcagagtcatgacacacttggtttggctacatctcagtagccacacatggctgggtggctgctgctgtggacagcatggacctaaagtccactcttgtaggtgatgttaagaatgcaaatatatttttctctacataatcctattttttttttttttgagacagggtctcactttattgcctagactggagtgcagtggcatgatcccggcccactgcaacctctgcttcccaggttcaagcaatgctcccgcctcagcctcccaagta

SEQ ID NO: 58949 - DNA, 4991 bp, Homo Sapiens
gtctaaaactctcttttctcttggctcttcttattcgagtgatgaggaggaggagttgcataattcacggcccttccacagtaccttccacaataccagtgctaatctgactgagagtataacagaagagaactataatttcctgccacatagcccctccaagaaagattctgaatggaagagtggaacaaaagtcagtcgtacattcagctacatcaagaataaaatgtctagcagcaagaagagcaaagaaaaggaaaaagaaaaagataagattaaggagaaggagaaagattctaaagacaaggagaaagataagaagactgtcaacgggcacactttcagttccattcctgttgtgggtcccatcagctgtagccagtgtatgaagcccttcaccaacaaagatgcctatacttggtgcaaattgcagctgtagcagtgctgttgtccacaaaggctgccgagaaagtctagcctcctgtgcaaaggtcaaaatgaagcagcccaaagggagccttcaggcacatgacacatcatcactgcccacggtcattatgagaaacaagccctcacagcccaaggagcgtcctcggtccggagtcctcctggtggatgaaaccgctaccaccccaatatttgccaatagacgatcccaggagagtgtctcgctctccaaaagtgtctccatacagaacattactggagttggcaatgatgagaacatgtcaaacacctggaaattcctgtctcattcaacagactcactaaataaaatcagcaaggtcaatgagtcaacagaatcacttactgatgagggtacagacatgaatgaaggacaactactgggagactttgagattgagtccaaacagctggaagcagagtcttggagtcggataatagacagcaagtttctaaaacagcaaaagaaagatgtggtcaaacggcaagaagtaatatatgagttgatgcagacagagtttcatcatgtccgcactctcaagatcatgagtggtgtgtacagccaggggatgatggcagatctgctttttgagcagcagatggtagaaaagctgttcccctgtttggatgagctgatcagtatccatagccaattcttccagaggattctggagcggaagaaggagtctctggtggataaaagtgaaaagaactttctcatcaagaggataggggatgtgcttgtaaatcagttttcaggtgagaatgcagaacgtttaaagaagacatatggcaagttttgtgggcaacataaccagtctgtaaactacttcaaagacctttatgccaaggataagcgttttcaagcctttgtaaagaagaagatgagcagttcagttgttagaaggcttggaattccagagtgcatattgcttgtaactcagcggattaccaagtacccagttttattccaaagaatattgcagtgtaccaaagacaatgaagtggagcaggaagatctagcacagtccttgagcctggtgaaggatgtgattggagctgtagacagcaaagtggcaagttatgaaaagaaagtgcgtctcaatgagatttatacaaagacagatagcaagtcaatcatgaggatgaagagtggtcagatgtttgccaaggaagatttgaaacggaagaagcttgtacgtgatgggagtgtgtttctgaagaatgcagcaggaaggttgaaagaggttcaagcagttcttctcactgacattttagttttccttcaagaaaaagaccagaagtacatctttgcatcattggaccagaagtcaacagtgatctctttaaagaagctgattgtgagagaagtggcacatgaggagaaaggtttattcctgatcagcatggggatgacagatccagagatggtagaagtccatgccagctccaaagaggaacgaaacagctggattcagatcattcaggacacaatcaacacccttaacagagatgaagatgaaggaattcctagtgagaatgaggaagaaaagaaaatgttggacaccagagcccgagaattaaaagaacaacttcaccagaaggaccaaaaaatcctactcttgttggaagagaaggagatgattttccgggacatggctgagtgcagcacccctctcccagaggattgctccccaacacatagccctagagttctcttccgctccaacacagaagaggctctcaaaggaggacctttaatgaaaagtgcaataaatgaggtggagatccttcagggtttggtgagtggaaatctgggaggcacacttgggccgactgtcagcagccccattgagcaagatgtggtcggtcccgtttccctgccccggagagcagagacctttggaggatttgacagccatcagatgaatgcttcaaaaggaggcgagaaggaagagggagatgatggccaagatcttaggagaacggaatcagatagtggcctaaaaaagggtggaaatgctaacctggtatttatgcttaaaagaaacagtgagcaggttgtccagagcgttgttcatctctacgagctcctcagcgctctgcagggtgtggtgctgcagcaggacagctacattgaggaccagaaactggtgctgagcgagagggcgctcactcgcagcttgtcccgcccgagctccctcattgagcaggagaagcagcgcagcctggagaagcagcgccaggacctggccaacctgcagaagcagcaggcccagtacctcgaggagaagcgcaggcgcgagcgtgagtgggaagctcgtgagagggagctgcgggagcgggaggccctcctggcccagcgcgaggaggaggtgcagcaggggcagcaggacctggaaaaggagcgggaggagctccagcagaagaagggcacataccagtatgacctggagcgactgcgtgctgcccagaaacagcttgagagggaacaggagcagctgcgccgggaggcagagcggctcagccagcggcagacagaacgggacctgtgtcaggtttcccatccacataccaagctgatgaggatcccatcgttcttccccagtcctgaggagcccccctcgccatctgcaccttccatagccaaatcagggtcattggactcagaactttcagtgtccccaaaaaggaacagcatctctcggacacacaaagataaggggccttttcacatactgagttcaaccagccagacaaacaaaggaccagaagggcagagccaggcccctgcgtccacctctgcctctacccgcctgtttgggttaacaaagccaaaggaaaagaaggagaaaaaaaagaagaacaaaaccagccgctctcagcccggtgatggtcccgcgtcagaagtatcagcagagggtgaagagatcttctgctgactctcttcctctctgctgaggcagctgcctcctgatcctggccagcccacctctcctgctgtccccgcgtgcacaagtctcttacactggacgcccactgctcctcagcgtccagtcctcctgggcggccccaggtcctggacaataagcaacagatgatattgagtgtcgggtggggaaggaggcccagactctgcttcggccatgatttgtgactgcccaggactctcaggttgggctggccctactcaggattacactgaaagtaatggcctcgtaagtacaggtgatggttttggacacgtcaggaattcctaaaggctgaaagagtgtatccaagtaaggtctgaacctccgactgccttttatttgggggaacacaaaaccaaacagcagatgttttggacttgatctgtgtacgtacatggggacctgtctgcatatacacacggggaatgccagaagaaggcccagtctgcaccaggcgtctggtcaacttagcacaagggcagtgcctggacggacccggagcccccgcatatcagcagttcacccagtactcctcagagactggtttccctctaaacccatcccgggcacataccacccctgttttgcatgtatttctcatttcattttagggatgacaaacatttgtgaaaccagtgagagaaggcttgatgtgtataaaagacgtgatgtgcaccacctcgatctcggtgtttcaggcactaaagcaacaaaaccacccatagtatctcattttgtcatcagatccagaagaaatatcctggttttccagcatgtttacccacatgttttgggcatggataaagtgaagaggcctactcaccattatccctgcagcgtgacaccttttgattgtcactgaccactcagaaggggccacggcctcctggctgtgttcctgaggcaatgcactaatgtgtaaaaattaaccgaatgcaactattttataatggagagctcttaccttttccttccagttcttaaactggcataaactttattgacttcatcctcctatttttatagcaacctagttttagatggtacaagttgaatttctatcacaagacaataaaataacatgaaagcattatcctagttaatgctatttcaacttaagaaatatctacattgaagtatttgataataattgtaaagttacttaaccgtatgtcatgttcagacagtatgtagcagctagtaacgtgcctggcacagagttgatgcttaataaatagttgctgaataaatgaaaaagaaaaacctgcctttggttgtgcatactttaatcactttctgatttagaaaaagatcagtctagagctcactactgcacactacatcaaactttgctgtaaacaaaagtaacaacttcaaacagaaaaatattacctgttagtgatagtcaacttatataaagagcccacacatttctatgcaaataattaaatttgatgttctgatgtttaacccttaggtaaagaaggccaaagtgtgctgactggctaatttgtatgctttatagtaataatgattagttcctcaagcggccgc

SEQ ID NO: 58950 - DNA, 544 bp, Homo Sapiens
tttacatgttgacggacagcatataatcacatgtataagggtttctgcttgtaaaagtctggaaacccattctaactgccagaatcacaaaacctagagaaggggacataactgccctgtggccacccagtagcttttatcttctctcgcgatggcagaggcaggacagccagcattctggtgaggattgaaggattagttgtaacagatttcagcaggtctgcagtgatcagatgggtttctcacatattgttaagttgaaagtagccgtggctcagtatgagttgagtacctgtttaaaatctgcattcaaagccttcttcccagaggccacaactgcagtgagatccaagtgtgtggctcacccgccccggggctcacagctgggcagggtgatttccactcaaattcttgtgccagtgcagatcttgttctaaagcttttctaaatgcctggagactagaaagacttttggatacttttccctttttcttttggatgaaatttcatctccagtagaacagcagcattccatggtgcctca

SEQ ID NO: 58951 - DNA, 485 bp, Homo Sapiens
tttttttttttttttttttaaataatttgcctgttgtttttaattgttgaggcagtaatacttggttcatgaaactgcaatatacagagaggggaaataaatagcttatatatatataatatatataatatagctggttttaaaatattcccttatcattggtgtactaggtcacgtgagtcacggaaggtcgatagcagcatcctccaaaactgcgagcaaggcagggtcaccatgattggacgaggcgtctgtcgtcgggaggtcgaggcgcggagaattcccaggggcaccccttccctgcgcggtgtctcggggcagcttgcagcggacaataaataaatgactgcaaaccaaagagcgatttttgttggagtttggggcaggaacagaggattgggaaagttagggggagtttgttggtgggcggagcactactttctctttgcttttctttttttttgctttttttttttttcctttca

SEQ ID NO: 58952 - DNA, 466 bp, Homo Sapiens
  misc_feature (41)..(41): n is a, c, g, or t
  misc_feature (317)..(317): n is a, c, g, or t
  misc_feature (350)..(350): n is a, c, g, or t
  misc_feature (357)..(357): n is a, c, g, or t
  misc_feature (412)..(412): n is a, c, g, or t
  misc_feature (420)..(420): n is a, c, g, or t
  misc_feature (441)..(441): n is a, c, g, or t
  misc_feature (459)..(459): n is a, c, g, or t
caattggcagaaatgatctttattagaaaaatgaaatggangctgtatttacatttttacaccatatgaccgggcacttctgttgcctcaggagttatatacatatcagtttgcacacgaatttcaatccccattccttaaaacagttgataacacattgaacaaaattaaaagacatactacaagaagacaaccatagtatatacttcctctatcatagaaaggtgttaagcaaacatataattttgtagctatgcttggaaatatttaatacacttattagcacttcctcatgcagtggattaaaacatgacagntataaactgctgcagttgatcagtgaacattanttcccanatgaaggccattgcttagggcagccagcttgctttcagctccaccatacagggcntcaggtcngttctgagtggggttttgggnttctgtttggatgtggcngtggatt

SEQ ID NO: 58953 - DNA, 3086 bp, Homo Sapiens
actgccacctcggtcggtcggtgcttacttcgctgccagctggtctgtcgccatgaacccggacctgcgcagggagcgggattccgccagcttcaacccggagctgcttacacacatcctggacggcagccccgagaaaacgcggcgccgccgagagatcgagaacatgatcctgaacgacccagacttccagcatgaggacttgaacttcctaactcgcagccagcgttatgaggtggctgtcaggaaaagtgccatcatggtgaagaagatgagggagtttggcatcgctgaccctgatgaaattatgtggtttaaaaaactacatttggtcaattttgtggaacctgtgggcctcaattactccatgtttattcctaccttgctgaatcagggcaccactgctgagaaagagaaatggctgctttcatccaaaggactccagataattggcacctacgcccagacggaaatgggccacggaactcaccttcgaggcttggaaaccacagccacgtatgaccctgaaacccaggagttcattctcaacagtcctactgtgacctccattaaatggtggcctggtgggcttggaaaaacttcaaatcatgcaatagtccttgcccagctcatcactaaggggaaatgctatggattacatgcctttatcgtacctatccgtgaaatcgggacccataagcctttgccaggaattaccgttggtgacatcgggcccaaatttggttatgatgagatagacaatggctacctcaaaatggacaaccatcgtattcccagagaaaacatgctgatgaagtatgcccaggtgaagcctgatggcacatacgtgaaaccgctgagtaacaagctgacttacgggaccatggtgtttgtcaggtccttccttgtgggagaagctgctcgggctctgtctaaggcgtgcaccattgccatccgatacagcgctgtgaggcaccagtctgaaatgaagccaggtgaaccagaaccacagattttggattttcaaacccagcagtataaactctttccactcctggccactgcctatgccttccagtttgtgggcgcatacatgaaggagacctatcaccggattaacgaaggcattggtcaaggggacctgagtgaactgcctgagcttcatgccctcaccgctggactgaaggctttcacctcctggactgcaaacactggcattgaagcatgtcggatggcttgtggtgggcatggctattctcattgcagtggtcttccaaatatttatgtcaatttcaccccaagctgtacctttgagggagaaaacactgtcatgatgctccagacggctaggttcctgatgaaaagttatgatcaggtgcactcaggaaagttggtgtgtggcatggtgtcctatttgaacgacctgcccagtcagcgcatccagccacagcaggtagcagtctggccaaccatggtggatatcaacagccccgaaagcctaaccgaagcatataaactccgtgcagccagattagtagaaattgctgcaaaaaaccttcaaaaagaagtgattcacagaaaaagcaaggaggtagcttggaacctaacttctgttgaccttgttcgagcaagtgaggcacattgccactatgtggtagttaagctcttttcagaaaaactcctcaaaattcaagataaagccattcaagctgtcttaaggagtttatgtctgctgtattctctgtatggaatcagtcagaacgcgggggatttccttcaggggagcatcatgacagagcctcagattacacaagtaaaccagcgtgtaaaggagttactcactctgattcgctcagatgctgttgctttggttgatgcatttgattttcaggatgtgacacttggctctgtgcttggccgctatgatgggaatgtgtatgaaaacttgtttgagtgggctaagaactccccactgaacaaagcagaggtccacgaatcttaccacaagcacctgaagtcactgcagtccaagctctgaagtgtcacaaggacaagtttaatctgcttcagaaagcgcctgtgtgcaactcaaattttgtggaatcttttcgaattcaaatagctatagagcaaatgataaattgacccctttttataaatggagggaaaaaatgaacagatttcagagattaaatgaaaaaaagcagatgtgttttaagtgcaattaacactgaaagagacctgttaaaccattcagaaaaagcttaagaaatgcgatatgacttccttttgtaatgctgctgatcccagtagactatgacttttgataattagcagaatttaactactgagtagttgattattttcacattttaattgctaatcactggctatataagtgtttttaagcaagggtatttttgaagtggtgtagaacccttccacgctttcctgctcagtgttctaccagacaagaaaagggacttggggaaggaaacttattggaaacttgatgcgaattaggttcttctttgcacaaactctgcctgcttgctctcccttgctgatgggttgcaattctcaaactattcatgctagcaatttttccacgggggggcctttttcccacgggggcctctataggggcccatttctccggtaaataggaatttcccctttaaggggtgccagtagtaggagtatagggaacctctcagctgtggcactgttgtagctttggagtcagagtgtactctgggcaatcagatttccacatattctgcatcttggataagcattaaaagttgggatactaatttggataaaaaaatgcactaggcaaactccagcgagacagaaagtatagggaaacctctcagctgtggcactgttgtagctttggagtgcagagtgtaactctggcgacaatcagatttcacatattctgtcatcttggcataagccattaaaagcttggagattactgtatttggcattaaaaaaaaatgtcacttaggtcagcactcccagacgtagcacagaaaaaccctttgacacaaaccatgtgttctgatttttggttcaga

SEQ ID NO: 58954 - DNA, 455 bp, Homo Sapiens
tttgggtggagatacagcagaattttatttccttctttatacatttccattatttccaaattttttacagcgaacatggtattactttgtaagcggactggggggaaaaatcttgaaaaaaaaattccctaaatatcttctttttaaaagtctggaaggaaatgcaccaagttcgtgaacccggatgacttttagttctggcactgtggaattttatcattaactgtgatgatgatgaattctgagtggttataatatttatgaacgaagccagctgctctggaagccgagggcggctgtgatgacgcctgtatcttgtataaatattcaggcacgcgaagagggaggcagaggggagggatggatactgaggcttccggaggcggggatcgaaccctaggcttgagcatggtgctgcccagtccgctcggaggcccgaccagcaggacgagctc

SEQ ID NO: 58955 - DNA, 501 bp, Homo Sapiens
  misc_feature (496)..(496): n is a, c, g, or t
gcataaagtaacttatctaggtctttaaatggctaggaagttaggaagttcaaatggctaagttctatttgaagttggggtaataaaataagcatcgaaattcagaacattctcaacaatcacttaggacagcagttactgaagcaattcttaatagtgctgtgaaaaggcagcaagaagtctcagataaggaatcatgctagatcataaatatttcagcaaattatgatgacatctaaaacacaaactagtcaagagaggcaaagcaggctttttgattagtaagtgaaaaatgaaacaagatgcatatcacaatacagtcactagtagacagctgaaattgatcacagtaacgtgcactttgtcactagatacaagtgggataaaagtcgatcccaaagcatgcggtacaaaatgtgcaacatccagctttgtgcagggggtcctctataaaccctatgagcccaaattatagtcacaatcgctggaaggattntacag

SEQ ID NO: 58956 - DNA, 534 bp, Homo Sapiens
tttaactgtgggtgtgtggcattaaaaatacagttgacttttgaataacacaggtgttacaggcaccaacccatcacacaatcaaaaacctgcatataatttttgaccctcccaaaacttagggagttggtggtcttgctgtgtatggaagaaaattcatgtatacatggacccacaaaggtcagacctatgttgttcaatggaaaactgtacaatgattactagtacagtttgccttaattaatgattaggtgctactggttttcacccacctatgcttttatatcatcaagacgtgcgtcaatatagcaagtaaggacaaaaaagcctaagtagtagtatcaaaatcatttgaccttttggacccatataaccccctaaaagggtcttggtgatccacaggggtctgttgaccatattttaaagactactgctctaaaaagggttaagtatgaaaagggtggaacaatataatagactaaaaaggctggaaatttttcaggtctttctcaaccaagaaaatataactggggg

SEQ ID NO: 58957 - DNA, 118456 bp, Homo Sapiens
gatcagttataatgtcacctttgtcatttatgattgtgcttatttggatcttccctcttttttctttgtcaatgtagctagcattctttcaatcctgtttatcctttcaaatacacttttggtttgttatttaatgctttttatgaaattttggtctcaatttttctcaatttttccctgatttattttattctgctagattttcagttagtttgttcttgtttttctagttcctctaagtgtgatgtcacatcattaatttgagatttttctaactttttgaggtaggcatttagtgctatgaactttccccttaacactgcttttgctgtctcccagagatgttgtcatgttgtgtttctgtttttatttatttcaaattttttttaatttctgccttaatttaattgtttacccgaaagccattcaggagccaaccgtttaatttccatatgattgtgtggttttgagagatcttcttggtattgatttctatttgtattccactgtgttccaagtgtatggctggtatgagtttaatttttttttaatttattgaaacttgctttacggccaagcatgtggtctttcttagagtatgtttagtatgcagttgagaagaatgtatattttgtgcagttagtggatggggtattctgtagatgtctattagatccaactggtcaagtgtcattttggtttcaattctcaagtccagaatttctttgttagttttctgcttgatgatctgtctaatgctgtcagtggggtattgaagtcccccgctattattgtgtgactatttaagctttttcatagatctagaagtacttgtttgatgaatctgggtgttgcaatgttggtgtgtgcatatatttaggataattaagtcttcttgttgaattgaaccctttgacattatgtaatgcccttctttgtctttttttactgttgtcggtttaaagtctcttttatctgatgtaagaatagtgactcctgctcttgcttgtttcccttttatgtgatagacctttctccaaccctttaccttgagcctatgaacatcattaagtgtgagatgagtctcttgaagacagaagatggacggatctttttttaatccaacttgccactctgtgccttttaagtgggggcatttagatcatttatattcaaggtcaacattaatatgtgaggttttgagaaaagtgtgaagttgttagctggtttctttgtactttcaattgtatggttgctttatagggtctgtgagctatgtacttaagtgtgttttttggcaggtatcatatttcatttacatgtttagaactcacttaaggatcccttgtatggctggtctagtggtagcaaattgccttagcacttacttgtctggaacatattttatttctcctttgcttatgaagcttagcatggcaggataggaaattcttggttggaatttcttttctttaagaaggctaaactaggcccccaatctctcgtggcttgcaaggtttctgttgagaagtctgccattagcctgatggggttccctttgtatatgagctgaccttttactctagctgcctttaagatttttttctttagtgttgaccttgaaaaatctggtgactatatgctttggtggtgatcactttgtatagtatctcacaggtgttctctgaattccttgtatctggatgtctacttctctagcaagatttaagaatttttcttgaattattctctcaaatatattttccaggttgtttacttttttctccatctctctcagaaaagccaacaattcatagttttggccactttacatagtcccacatttttcatagactttattttttaaattcttttttctttatttttgtctgactgggttagttcaaaaaacaggtcttcaagctctgaaattatttcttctgcttggtctagtttattgataaagctttcagttgcattttgaaattccttaagtgagtttttctattccagaagctttgattgatttctttttaagatgtttatatctttcatttcctggattgctttagaaatttctttgtgttgattttcagtcttgtcttggattccattgagatttcttgcaatccatgctttgaattctttgttgtttctgagtttccattttgattagccaccattgctggagagctagtgtgattctttggtagtttcactacattcaggtttttcatggtgtcagaattcttgcaatggcttcttctcttctagagacactagcactttctaattttttaattattttttacaggtaggattttttgtctattttcctatgatattattatattttttctttccttttccctttctccgcctttctagggtgtgtgactggtggggagcgtcttttggctttgctcctacagccctatgcacttctgtaagcaggtttttattgggctatgcggtttgacttgtaagccagtagatggcgcttataggtaagagccagctgccgtcaatgcggctgggtatatatttcatctttgtttactgggagaaactgtatattgcttcaggcgatgggctgatccacggagtgcacagtgatctgagcttcctgttcagccccgggttggcagggggcaagatggccaggccacagcccacctacaggttcctctgatgacaggcacaagcaccagcaccaatggagaatccagttagcggttaccaagtgcccagaggtgtgcctaggcatggtgctgggaaacctcctatgtcacaagttctttgcacgggggaggagatggcctaaactcctaatccaagagagtgggtgctccagattcctggagatctgcctgggtgtggagtgcagagggccccactgcaccacaacctctgcacaggaggggcaggcaactcagactgctgaccccggcaaatgggtgctcctaatacctggtgatctgcctgggcgtgaagcagagagggcccccctgcaccatgatctctgcataggagtggggtgtcaggctgctgaaccagacaagcaggtgctctgcatgcctggagatctgcctgggcatgaagcagagagggccctctgcacctagatctctgaataggaagggtgaagtgactcaggctgtcaatctgggcaagcagaagctttgagtgtttggagctctgcctggacatggagcagagagggatccattgcaccacaacctattcccaagagggatggggcaactcaggctgccagtacatgtgagcaggtgctccgaatgcctggagttctgcatgggggtggagcagagagggctccactgccccacaatctcaggggagcaggctagggaacccagcaatgacacatgcacaccagttccaggttgccaagccagccctggcagcaagtctcatcacccaagagaaattgcagctgtagcagatcttctcttgtcccaggctcttatcagctggacaatgtcatgggggctgtttgcccatatcctcctccctgagatctgggatgtccatcatgattccagggaattcccattttccttcttgaattaaagctcatagagtttatctttatacactgttttgctatttccaagtggctaaggcacactaaaagcctctcatccaccatcttaacttaaaagttcacatttaaacaccatgaatgttggaatcagctttattaatggaaattgcattaccattaaaataatggttctggccaggtgcagtggctcacgcctgtatcccagcactttgggaggccgaggtaggcagatcacttgaggtcaggagctcaagactaacctggccaacatggtgaaaccctgtctctactaaaaatacaaaattaactgggcatggtggcgggtgcctgtaatcccagctactcaggaggctgaggcaggagaatcgcttaaacccaggaggcggaggttgcagtgagctatcttgccacagcactccagccttggcgacagagtgacactctgtctctgtctctctctctgtctctctctctctctgcctctatctatctctctgcctctatctatctatttatatatatatataaaatttttaaaaaatggttctgcagactgtacaggtagcatggcaccatcatctgcttctggtcaggacctcaggaagcttttattcatggtggaaggcacaggaggagcaggtatgtcacatggcgagagaaggagcaagctcagtctacttctacctgctttccggctcctttactacagcaagaaaagttcttgttcatgtcacaataacctccatattgtcaaactttttttcatttttcaacttacttgacttcttggcaggctttgaaccagttaataatttcctccttcttgaaatgttcacctcccttagctttttaaaattgaattattttgaaataactgtagattgatattcagttataagaagtaatacagaacaatctcaggtaccccccacctagtttttcccaatggtaacatcttagaaaactatagtataatatcatactcagaatattgacattaatacactcaaggtatagaacagtttcctctatttttttccttttatacactgttcttttggtgtcaaaccaaagaacctatgactaggtctagatcctagaggtcttctcctatgttcttctcctctgtttgtcctaaagttttacaattttactttttttttttttttttttttttttttttgagacagggtctcgccctgttgccaggctggagtgcagtggtgcgatctcggcttactgcaaccttcgcctcccaggttcaagcaattctcctgccacagcctcccgagtagctgggactacaggtgtgcactaccacacctggctaatttttgtatttttagtagagatggggtttcaccatgttggccaggatggtcttgatctcctgacctcatgatctgcccacctcggcctcccaaagtgctgggactacaggcgtgagccactgcacctggcctacagttttacattttacatttaagttcatgactcattttgagttagtttttgtatgaggcttaggctggggctttttgttttgttttggcctatgaatgtccaattgctccaatatcatttggtgaaaagtctatccttcctccattgaattacttgtgcaaaaaagtggacaccccaacaccatactgtcttgattactatagttatatagtaatcttaatagataatgtctgttttgttaacaactcctcaactccttgcaaggtgcctagcaaattgatacaaaacacgtttttttcttgattcaatttttttttttttgctttttattttttgtttcaatagagttttgggcaataggtggtgtttggttacgtggataagttctttagtggtgatttctggaattttggtgcacccatcacccaagcagtgtacactatacccgatgtgtagtcttttatccctcatccccttcccaccctttcctctgagtctccaaagtccattgtgtcattcttatgcctttgtgtcctcataacttatctcccacttaagagtgagaacatatgatgcttggttttccattcctgagttacttcacttagaataatggtctccaattccatccatgttactgcaaatgccattatttcattcctttttatggctgagtagtagtattccatggtatatatataccacattttctttatccactagttgactgatgggaatttcagctgattccacatttttacaattgcaaattgtgcttctataaacatatgtgtgcaagtatctttttagtatgattacttattttcctctgggtagatacccagtaatgggattgctggatcaaaaggtagatctacttttggttctttaagaaatctccaggctgttttccatagtggctgggactagtttacattcccaccagcagtgtaaaagtgttcccttttcaccacatccacgccaacatctatgttttttatttttttattatggccattcttgcaggagtaaggtggtatcacatcatggttttgatttgcatctcgtggtttagtgatgttgtacattttttcatatgtttgttagccatttgtgcacctgtgtatctccactggtggtagcaggggagtaaagtggactctgtgagggtccttggttgtagttctgtttagtgcactggttttgtgttggttggcctccagccaggaggtggtgctttcaagacaatgtcagctgcggtagtatagggaggatataagcttgccctagggtcaggtggataagtattcggggtgtctcaggcagagggtggggccatagagctttcaagagattatgccctttgtcttcagctaccagggtgggttgagaaagaccataaggtggaggcacggttggttgtgtctgagctcagactctccttaggcagagcttgctgtggctgctgtggcggatgggagtgtggttatcaggccaatggaattacgttcccagggggactattatcgggggacctgccccgataatcacgtaggttcttttctattttcctaagcatcggctggcttgagaaataaaaggacagagtacaaaagagagaaattttaaagctgggtgtccgggggagatatcacacgttggtaggatccatgatgccccacaagctacaaaaaccagcaagtttttattagggagtttcaaaaggggagggagtatacgaataggtgtgggtgacagacatcaagtacttaacaaggtaatagaatatcacaaggcaagtggaggcagggcgagatcacaggaccacaggatggaggcgaaattaaaattgctaatgaagtttcgggcaccattgtcattgataacatcttatcaggagacagggttttgagatcaaccggtctgaccaaagtttattaggtgtgaatttcctcttcctaataagcctgggagcactatgggagactggagtttatttcacctctgcaatctcgaccataagagacaggtacgccccgggggggccagttcagagacctacccctaggtgcgcattctctttctcagggacgttccatgctgagaaaaggaattcagtgataattctcccatttgcttttgaaagaagagaaatatggctctgttctgcgcagctcaccggcggtcagagtttaaggttatctctcttattccctgaacaattgctgttatcctgttcttttttcagagtgcccacatttcatattgctcaaacacacatgctgtacaatttgtgtacttaacgcaattattgcagggtcctgagatgatacacatccttcttggctgacaggattaagagattaaagcaaagacaggcataggaaatcacaaggatattgattggggaagtgataagtgtccatgaaatctttacaatttatgtttagagattgcagtaaagacaggcataagacattacaaaagtattaatttggggaactaataaatgtccataaaatcttcacaatccacattcttctgtcatggctttagccggtccctccgtttggggtccctgacttcccgcaacagactatggctgtctctgctgtgtcatacaggtcaccagggaagtgggggaaagcagcagtgacaggtctcaccgggctcccacacagcccaaaaggccagtcttacttccaccatgcccccgccaactgcactgagtttgttcccaggcagctggtgagcagggctgagaacttgccccaggctacaagcctccccactgagaaagcaagtagggctttcagggttcatgcttccctgcctgccacagttaccttgcttgtatccacactccccgtttgctccctcccatggattctgtccaggaaactttgcattcagtcaaaattgttacccagttcagctagaagtttccttctccctgtgggctttccccaattccactgacagcccaccccatggattcctgtgagacaaagtcaggaatggcttccctggggactgagagtgcccacagggctcttcccattgcctcctatatccctgtattttgctcagctctctaaattcaactcagctccaggtaaggtcaaatccttctcccatgatctggatcttcaggatccccagtgaggatatgtgtttaggggcaaatgttccccctctcacactttgggcgctcacagtttttcatctgtctcacagagcctgcagcagcaagccacttctttcaaagggtctgtggattctctcagctttcctggtatgttcctgcagtagttcttggagcaaaagttcacgatttgagtctcctctgcacactaccctgtccatccaagtgggagctgcaagttagtccttcctcctacctgccatttttcctgatgcaatatttttgtgcctttaaatttagggactcttatttctttactcttttttgtttttgtgtttttagactgggtctcactctgctgcccaggctggagtgaagtttttttgttttgttttgttttggttttggttgtttgtttaagagacagacaggttggagtatagtggctattcacaggaatgatcatagtgcactacatcctcaaactccttggactcaaatggtcttcctgcttcagcctcctgagtagctgtgactataggcacatgctaccacatttggttacatttttttatatttctgcagtggagcagaagtatatattctgggcgaggacaatgttggaagctatgctatctaatagaactttctgtggtgatggaaattttctgtctgcactatctgatatgttagccactagccacacatagctattgagcacttaaaatgtggctggtgcaagtgagagctgatttaaaatttttatttaatttcagttaatttaaatttcaacaatcacctgtggctagtggctactatattaagctgcacgagtctagagagtggacatgaaagaggatgtctaaaatggaggcaggtcaaggtcattatgtttcaaaaagtcaggaactgctaggccaatggtttggagtaataaaccatttggactttgaaaccccccaggacaatgagatgaatgttggcaaggaaagatatgtgttagaggccaaaaggcctggattactttgggggcatgaccagtggccaggcaacagagatgagctgtggtaagtgattgattcatctggcatgggttaaagtggtggttccagcaaggaagacaaacaacggcctggaaacagcctcaggaaatctagagaatgccagccccgtctccagtccctgtattagaatgggcatcctccactctccactactccaacagcgtccttagagaaaagttgagtcaagtaaggcaaggaggcacaagtagcatttggtgacaagggtgagcatgtaagacagcttgtttaccacacaacaaagaatctggggaacatagtagaaatatttatgagaaaaggaagatgtggaaagaagggctgggataagaagcacaacctataggaatatgagagacaatggaagcaaaactgctctccaaaagtctgcccaggtggcagtagagctgtctatttttctccttggaaaaaggttctgttgccctaattatacagctttggaaactttttggcaggaagattaactttttggaagcaagcaatgtatattacacttttcataaaaattaacattttgtttaacaaatgttttttattgtaaaatacacttaacatgaaatttaccaatttaaccattttaaagtgtaccattcagtggcacttagtatattcataatcaataaatggttttgaacataaaaaggatgtggggggcatttgtagtggtagccagtgataggactctagtgggcttcactgttatcaaggttccaaatgaaatgaaagtataatgtcaagatacttcagattcagtgctggctgaagtgcaggtgatacagaagcaggtggtgattctggtttgtaggcactgagctgggtacaaatactttgttcactcaaaaatattgtataagtgaatattgagtccagttctctccttttgcttctgaagagcacagtaacacattattctgagccacagaagttaattaaccctctattagtcttgttttctcatgtataaaattgactaatattaatagttccagaactgtcatgaagattaaatatatgtagaatgtgttagcacagtgcctgacacatactatactcttaataaatggtagctattatcattattatgttatgggactggtccaactctgccttttattagagctattagaacaatggtcatatcccctctgttgaactaatcttattaagggcagggatggtacacactgatcttttcatactccataggttcaacgcatagtaggaagtacagacacatttgttgcgtggaataattgttttatgtctacctcttccttcttcctctacctctagctgaagtctgtatgaagatgtttgattgttaagagcacaggttttagagtcagatatagggttgaattttggctctgccacttactacctgtatggcctttggcatattacttgatggctctgagtctcataagtaacatcaagaaaataaatatctacttcatagaattagataagaaaatttagtaatgtaccatgcctgtacaagaattagtagcttcttattgttattaatattaacagtaataattcctattgctattaatattattgatatggtttggatctgtgtccctgcccaaatttcatgtcaaattgtaaggtgattggatcatggggacagtttctcatgaatgatttatcaccatccctcttggtactgtcctcaaaatagtgagtttgttctcatgagatatggtcatttaaaagtgtgtggcacctctcccttcaatctctcttcctcctgctccagccaggtggcatgccagccccccctttgccttccaccatgattgtaagtttcctgaggcctccccagaagccaggcagatgctagcatcatgcttcctatacagtgtgcagaaccatgagtctggtctaggttcatggttcataaaatctcttttctttataaattatccagtctcaggtatttctttatggcaatgcaagaatggactaatgcaattattaatatctgtttcttttggaaaagggggcatacccccagctcattctaatggggattaaggagtggtttggtgaggtggagcatgagacattcccactagggaatggaacatgttactgcacctccaactcattcagggaaggttttctagagttagaaaagcaagaaagacacaggagagtaagagaaactggatcaactataaataaaactggcaagtaggtgacacttgttagtggtgtacaccttctttccccaggccattacctccttctccagtttaggcacttacagatatgcccagaccaagcctgccatgttgtctaccagtgctccagaacctcctcttcccctctcctcttctaactactagaagtcacttgttctgtaagttctagactcctgggaaacagtcaggagctaatatgctaacctaattagaggtcaggtgttaacaggctgcaaatagtttcttgtttcttgaccatagagtgctttcaaccaccttatctcatgagacttgtggtgaaaactgaaggcctgggaatgtgaaaaggatcaggtctttgggcgaggaaaactttcccatgctgcataggcaactgcttactaagcccttgggtagagtgagccttgaaaaaaagaaaaagaatgtgaagtgaaatgagcaggcccttcccagtaaactcctttgatgtcctcaaagtggtaacaaccacaataaacacctcgaagttgctaccacccccattagtgtttacacattattcttgtcgacagtatcttttctgatcttctctcccttaaggatttcctaacccctgcttgcctcagatccagagtcactgccacctgcagttgccacaaactggtagaccagcctttcgctttctatcatctttgagactcaattccaattgtaggcctgcctttcaccagccatctatcaccaatgaacatttattgagcacctaacgtgtgtaaggccctgtctttccttcctggctactattgagactgtatagtgaatgtacggagttttattcacaaatgtgccactagttatcccacagatagagacatgtttaggctattttttccatgaaatatgcaactttcaattgatttacccacctggttcatttttttgaaaagtgtacaaacgaagagtccaaggactgggttccaagatggccgaataggaacagctccagtctacagctcccagcgtgagtgacgcagaagatgggtgatttctgcaattccaactgagctttgaagagagtactggttctcccagcatggagttggagatctgagaacggacagactgcctcctcaagtgggtccctgacccccgaatagcctaactgggaggcaccccacagtaggggcaggctgacaccccccacggccgggtacccctctcagacgaagcttccagaggaacgaccaggcagcaacatttgccgttcagtaacattccctgttctgcagcccctgctgctgatacccaggcaaacaaggtctggagtggacctccagcaaactccaacagacctgcagctgagggtcctgattgttagaaggaaaactaacaaacagaaaggacatccacaccaaaatcccatctgtacgtcaccatcatcaaagaccaaaagtagataaagccacaaagatggggaaaaaagcagcaaaaaagctgaaaattctaaaaatcagagtgcctctacccctccaaaggaacacagctcctcgccagcaatggaacaaagctggacaaagaatgactttgacgagttgagagaagaaggcctcagacgatcaaacttctttgagctaaaggaggaagttcgaacccatggcaaagacgctaaaaaccttgaaaaaagattagacaaatggctaactagaatatccagtgtagaaaagtccttaaatgacctgatggagctgagaaccatggcatgagaactatgtgatgaatgcacaagcttcagtagctgattcaatcaactggaagaaagggtatcagtgattgaagatcaaatgaatgaaatgaagcgagaagagaagtttagagaaaaaagaataaaaagaaatgaaaaaaggctccaagaaatatgggactatgtgaaaagaccaaatctacatctgattggcatacctgaaagtgacagggagaatggaaccaagttggaaaacactctgcaggatattatccaagagaacttccccaacctagcaaggcaggccaacattcaaattagggaaatacagagaacgccacaaagatactcctcgagaagagcaactccaagacacataattgtcagattcaccaaagttgaaattaaggaaaaaatgttaagcacagccagagagaaaggtcaggttacctacaaagtgaagcccatcagctaatctctctggagaaactctgcaaggcagaagagagtgggggccaatattcaacgctcttaaggaaaagaattttcaactcagaattttatatacagccaaactaagcttcataagtgaaggagaaataaaatcctttacagacaagcaaatgctgagagattttgtcaccaccaggcctgccctaaaagagatcctgaaggaagcactaaacatggaaaggaacaaccggtaccagccactacaaaaacatgccaaattgtaaagaccatcgaggctaggaagaaactgcatcaactaacgggcaaaataaccagctaacatcataatgacaggatcaaattcacacataacaatattaaacttaaatgtaaatgggctaaattctccaattaaaagacacagactggcaaattggataaagagtcaagacccatccatgtgctgtattcaggagacccatctcacatgcagagacacacataggctcaaaataaagggatggaggaagatctaccaaggaaatggaaaacaaaaaagaaggcaggggttgcaatcctaggctctgataaaacagactttaaaccaacaaagatcaaaagagacaaagaaggccattacataatggtaaagggatcaattcaacaagaagagctaactatcctaaatatatatgcacccaagacaagatcacccagattcataaagcaagtccttagagacctacaaagagacttagactcccacacaataataatgggagactttaacaccccactgtcaacattagacagatcagcgagaccaaaagttaacaaggatatccagaaactgaactcagctctgcaccaagctgacctaatagacatctacagaactctccaccccaaatatacattcttctcaacaccacattgcacttattccaaaattgaccacatagttggaagtaaagcactcctcagcaaatgtaaaagaacagaaattataataaactgtctctcagaccacagtgtaatcaaaccagaactcaggattaacaaactcactcaaaaccattcaactacatggaagctgaacaaccggctcctgaatgactactgggtacataaggaaatgaaggcagaaataaggatgttctttgaaaccaacaagaacaaagacacaacatcccagaatctctgggacacatgcaaagcagtgtgtagagggaaatttatagcactaaatgtccacaagagaaagcaggaaagatctaaaattgacatcctaacaacacaattcaaagaactagagaagcaagagcaaacacattcaaaagctagcagaaggcaagaaataactaagatcagagcagaactgaaggagatagagacacaaaaaaacccttcaaaaaatcaatgaaaccaggagctggttttctgaaaagatcaacaaaattgatagaccactagcaagactaataaagaagaaaagagagaagaatcaaataaaggaaataaaaaatgataaaggggatatcaccaccgatcccacagaaatacaaactaccatcagagaatactacaaacacctctaggcaaataaactagaaaatctagaagaaatggataaattcctggacacatacaccctcccaagactaaaccaggaagaagttgaatccctgaatagaccaataacaggctctgaaattgaggcaataattaatagcttaccaaccaaaaaaagtccaggaccagatggattcatagccgaattccaccagaggtacaaggaggagctggtaccattccttctgaaactattccaatcaatagaaaaagagggaatcctccctaactcattttatgaggccagcatcatcctgataccaaagcctggcagagacacaataaaaaaaaaagagagaattttagaccaatatccctgatgaacatcaatgcaaaaatcctcaataaaatactggcaaaccaaatccagcagcacatcaaaaaccttatccaccatgatcaagtgggcttcatccctgagatgcaaggctggttcaacattcacaaatcaacaaacgtaatccagcatataaacagaaccaaagacaaaaaccgcatgattatctcaatagatgcagaaaaggcctttgacaaaattcaacagcccttcatgctaaaaactctcaagaaattaggtattgattggacgtatctcaaaataataagagctatctatgacaaacccacagccaatatcatactgaatgggcaaaacctggaagcattccctttgaaacctggcacaagacagggatgccttctctcaccactcctattcaacatagtgttggaagttctggccagggcaatcaggcaggagaaagaaataaagggtattcaattaggaaaagaggaagtcaaattgtccctgtttgcagatgacatgattgtatatttagaaaaccccatcatctcagcccaaaatctccttaagctgataagcaacttcagcaaagtctcaggatataaaatcaatgtgcaaaaatcacaagcattcttatacaccaataacagacaaacagagagtcaaatcatgagtgaactcccattcactattgcttcaacgagaataaaatacctaggaatccaacttacaagggatgtgaaggacctcttcaaggagaactacaaaccactgcgcaatgaaataaaagaggatacaaaccaatggaagaacattccatgctcatgggtaggaagaatcaatatcgtgaaaatggtcatactgcccaaggtaatttatacattcaatgccatccccatcaagctatcatgactttcttcacagaattggaaaaaactactttaaagttcatatggaaccaaaaaagagcccacattgccaagacaatcctaagcaaaaagaacaaagctggaggcatcatgctacctgacttcaaactatattacaaggctacagtaaccaaaacaacatggtactggtaccaaaacagagatatagaccaatggaatagaacagagccctcagaaatagtaccacacatctacaaccatctgatctttgacaaagctgacaaaaacaagcaatggggaaaggattccatatttaataaatggtgctgggaaaactggctagccatatgtagaaagctgaaactggatcccttccttacaccttatacaaaaattaattcaagatggattaaagacttaaatgttagatctaaaaccataaaaaccctagaagaaaacctaggcaataccattcaggacatgggcatgggcaagggcttcatgtctaaaacaccaaaagcaatggcaacaaaagccaaaattgacaaatgggatctaattaaactcaagagcttctgcacagcaaaagaaactactatcagagtgaacaggcaacctatagaatgggagaaaatttttgcaatctactcatctgacaaagggctaatatccagaatctacaatgaactcaaacaaacttacaagaaaaaaacaaacagccccatcaaaaagtaggcgaaggacatgcaaagacacttctcaaaagaagacatttatgcagccaaaagacacatgaaaaaatgctcatcatcactggccatcagagaaatgcaaatcaaaaccacaatgagataccatctcacaccagttagaatggcgatcattaaagtcaggaaacagcaggtgctgaaggggatgtggagaaataggaacacttttacactgttggtgggactgtaagctagttcatccattgtggaagtcagtgtggcgattcctcagggatctagacctagaattatcatttgacccagccatcccattactgggtatatagccaaaggattataaaacatgctgctataaagacacatgcacacatatggttattgcggcactattcataatagcaaagacttggaaccaacccaaacgtccatcaatgatagactgggttaagaaaatgtggcacatatacaccatggaatactatgcagccataaaaaatgatgagttcatgtcctttgtagggacatggatgaagctggaaaccatcattctcagcaaactatcgcaaggacaaaaaaccaaacaccgcatgttctcactcataggtgggaattgaacaatgagatcacatggacacaggaaggggaacatcacacaccggggcctgttgtggggtggggggaggggggagggatagcattaggagatatacctaatgctaaatgacgagttaatgggtgcagcacaccaacatggcacatgtatacatatgtaacaaacctgcgtattgtgcacatgtaccctaaaacttaaagtataataaaaaagagagaataaatccttgtgcattaaaaagagagagagacagctcatatggagatgcatttatatctccccaatttagaaattttaaatagaggtactttgcataaaatgagttttcaatgtggatttcataacacttgaatgctaaagagcttttgctttaaaaaaaatcccacatacatattgtgatgattaattttatatgtcaatttggctaggccatggtacccagatattttgtcaagtattattctagatgtttctgtgaaagtactttttaggtgaaattaacattttaatcagtacattttgagtaaagtagattatcatccatagtatggtttggcttcgtccagtcacttgaaagccttaatagaaaaagactgacttcctcagaaaagggagttctaccaccagacaaccttcaggctcaaagcacaacattgactctttcccaattctctagcctgccggcctaccattcaggttttggacttgccagcctccaaaactgcataagccaatttttaaaaataaatctgtttctggctctggctctctctctctctacacacacacacacacacacacacacacacacacacacacacacacacacacgcaattagttctgtttctctggagaaccttgactaacatgtataacacttttttttaattaatgtgattatggtggacttgaagtcagacacatttgagttttgaattgggcctttgccatatttttttaccctaactatattggacctcttccatttcctcatctgcgaaaataccagtaataatctggatctctcacagctgttgtgcagattaaaagaatttgtgcatactcagcacaatgcttagtactcaataattgctaagcatgagttattgttattgataatgtttccacttaaaatgaaaattgtcttcctaaacttgttacacagaagcaactttagggactgccacatttattcctcctcttcatgactccttgaaatgtgttttgatcctaagacatccgtcttgagttgcatatttttcaaatattcctgcagaatgaaaactaacagttacaacttacttgagcttctgtaatttgcaatttggatcttttaagcctccatagagcaatttcaaagctgaagcttccagttttgtctcactaaattccagttcagtgagccactgactggtgctaagaacagctgctagagccccacaagaagcagaagagataaggcaccggtaccacctttagagaacagaagaatgacctcattaccacattcatgctctcccccaacagaaatagaaattgacccccaaaataagaatatcaaataacaaattatcctgctacaattacctcaatgtctgtaagacacagttgggctgttttaatccttcacacagaagcttcattcctgaatcttcgagggtattttttacaaattcgaaatctgtcagatgctggttagtttcaaatactgaggagaggtccctaccacaagaagctgtgaggcgacagaaaatcagtctgtgtggagaaaaaatacatttcagaaacaaacaaaaaaaataagagatatctttagaggtacttgttagcaccttgctgatgtaataaattatttcaattcattcaataattaatatattgggtgcttaccactgtgctagatgctgaaaacacaaagataattaagacacagactaaaccctccaggaatccccagttgatggagaaaaatgacgagaaaatcacagattacaatacagtgtgaaaagtaccgtcagacatatgcacaagttgttatggggacacaaaaaggttgcacaattcagcctagcttgaggtggggtctggagaatcaggaaatacaagaggaagaaatgtttgagcactgtcatgaaaagggaatagaaactgtataggagttaggtgaatgaaaagaatgggagtggagagagcaggaggggatgaggagaaatccgtgcatgcacagaggagcctgtgcaagggccacagaggaagagagaagatgcttcgtttgaaaaactaaaaattacttgctatggcctatctaaaagactatataactattaagagggattatcacccaggttgaaggaagggtaggattatagaagtactttccaagcacttaaaaattatttacaatgatcagctgttactgggagaaacattttttttcaattttgaaaaacataacacgtttattataaacaattttacaatagagaaaaatgtcaagaatattttttaaagtactgtattcctattacccaaagataaccactgttaaagtgttagtatataactttccagatttgtgatgtatgcatacatatagttagttatatgctctttgtaacaagcgaaattagagaaaaatgtattttaaagttaaaaactttttttctaacctccagtccaaccccacttcccagagataattaatgttgagtctgctatatatcctctctcattctgttctccaagattatagaaacatacaaacatatgcaaacacacacatacacacaaatacgggatcatagaaaacattactcctacaactttacatgcccttttgtcattggccatcatcatagatccataggtagaaacagattcagttacagtacaatgtcatgtaatacgtagcaacgctggactcaacctgagatttgtctgatttatcttgtgggtctcagaaagtcattcaaggttttcttgtttttgtgtttgtttgtttgagacagagtctcactctgtcacccaggctacagtgcagtggtgcgatctcggctcactgcaacctccgcctcgtgggttcaagcgattctcctgcctcagcctcccgagtagctgggactacatgcgcgtgccaccacatctggctaattttttgtaattttagtagagacggggtttcaccctgttagccaggatggtctcgatcttctgacctcgtgatccgcccatctcggtctcccaaagtactgggattacaggcatgagccaccgcgcccggccgaaggttttaagagacatattcatatccctctgatggaagatctctgatatttcatgttttggtaaaaaggtgtatttatgctactcctaactctctttctcccacagttgcttcaagattcaaggcgtttcagtaggggaggagtgggagaaggggtgatgggaggagtgtggggaaagaggagctaagggaggaaaggcaggccaggatttgttagggtgtctgggatgtttagtcctgagcaaacaggggataagctccgctcctggctccaccctcttcctccaagggcaactgaggggttggggctgtttcctgctctagaatattccagttgggggcgaaactcccctggcatggcacaaaccattatgatggggagggataagtcttcaacttgttcacaaatactttttttggtcctaagtccttccggaccactcctgtttctttcagccttcaaggtctcccgaccatgtggcaggttcccttttgtcccagtggaatggcagaggccttcctcactcactccctttcacccctacagtctctggaaattggaacagtcccagagtaaaatcctcatgggttggccctgaggcttcttttcccgcagagccctaggagggaaagaggccaccctctcttcaggcgtgttaagcagcggggttggcctgtacttcctctggccctggctgaagaggtgaggcctggtgggagatgtcctagggtaggacaagccggtcagagggtcattaggagggtcttgtcagaggtgggagggcggagaagacagatgaggggaggggctaaggaggaggaaagaaacctattggctgctccatccacacagggctagtgaaaccgttaagcccctaggcgatcatggccttgagacctgaggaccccagtagtgggttccggcacggaaacgtggtggccttcatcatcgagaaaatggccaggcacacgaaaggccccgagttctacttcgagaatatatccttatcctgggaggaggtggaagacaagctcagggccatcctggaggacagcgaggtgcccagcgaggtcaaagaggcctgcacctggggcagcctggccttgggtgtgcgctttgcccacaggcaggggcagttacaaaaccgcagggtgcagtggctgcaaggctttgccaaactgcacagatcagctgcgctggtcttggcctcaaacctgacggaactcaaggaacagcaggagatggaatgcaatgaggcgaccttccagttgcagctaaccgagaccagccttgcggaggtgcagagagagcgggacatgctgagatggaagctcttccatgccgtaagatcccccgaatggtccctgtccaatgcctctgccctgccccaacctgtccggaccccctgccctgtccccagaatgtgtttcagctctgcctacttctctccaggagctggcacctccccagggacagggccaggctacagtgtttccaggcctggccactgccggaggggattggacagaaggagcaggtgagcaggaaaaggaggcggtggctgctgctggtgctgctggaggaaaaggagaggagaggtatgcagaggcagggcctgcccccgcagaggtcttgcaggggctgggaggaggcttcaggcagcccctcggagctattgtagcaggcaaattacacctttgcggggcagagggagaaagatctcaggtcagtacaaacagccatgtctgtcttctctgggcttgggtccacagtctcactggagcctcttcctgtccagctccctacctcattcacatactcatacccatgccctttgtccgccttctcagccatacccaatatacccccttcaccagcaaaggtcacagaacgggttccaactcagatgcctttcaactggggggcctctgatgctagcctgtggtcagatgtggaggcccagggaatagaccctcaagagcccccaagagacaggagagactccgaactccatcagcagagaagacctccagtatatcgcaggccagggaactgggactgcccgtggtgtaaagctgtgaatttttcatggagggaaaattgcttcctctgtgggaggcgaatctggctgcaaaagcctcagtaaattcagaaatgtaaaatagaacagaaatatatctcaatgggaaatcaatcttcagggggagaggggagaggtgggagggggattgggtggagtgggggaaaggggatgagtgggaagattggacagtaggggggcggggaggcggggttgtgggtgggaggatgtagatgacaggcagggagagacatgttttaatgactccatttgtatttcagagtattagtagtcaacactccagaactactgcagtttttatttgtgtgtgtgtctctagctccctatcttaagtatctgtcggacctgggcagtatgtaacacctacactctctcccttcatgtaggctttagataattggagcaggagtggatatttgaccaatcctgagccaaatgaatttttacgttagaaaatctgaacagacaggcagattccacagtcagaatagtgttgggcaatgaagcagtgggtcacttggagttggggccagggtcacagccatggacaccaaggccatagctgaggcctggccctggctgtgggggaacagaactggatgctttacagagtcaagtgtcttttagaggacgccagtatgaggtttcagggagcagacaggcatagaggagttcatcctgtgactacagagagatggagagggtagtgatggcccaatcacttttcacttcctgtagttgtgctacaggaaaatgtactttacacagatcccctttactttaaactaatttgagtgagtttctgttctgagcaaccagattatttcccagtcagaagtttgtaccagaagagcaattttgaacaaaagaccattaaagaaaatggtgggactggctggggagttgcatcagggtgtggtgagcagtggagattcctgaatcccaagagtttccatgaatgaactggatagaagttcattcatgctctgagtgagttatatcacaagaaacaatcaaaacaggcccaggatgaaccccaggttcatcctgactcaaatcaacagcagagatttgccacccctaagggaatcccttaggcctacctacagaagacaccagcaccatgcaggtgcagactgctatgactgtatggccccatgacaggagaatcctttccagtccccagtgagtagaaccagggcagtcagatctgaaaagagaactgccactgccaaggaggtgagtcagcaactgatagtgctcagagggtttgctggtctagactatgagccaaagcatggtgccatcttgagagattctctcccccaacccaccaccatgataaatgtgggagggaaatctggctacaaagctctcagtgaattcagaaatgtagaacagaacagaaacatatcccaatgggaaatcaacttccagagggaaggggtgaggtggaggaggataggagtgggtacggtaagggggtaggtgacgggttagtctgcttctctccctctgatgattgtaagttttgttgacgggggctacatgtatgttttagcgcacaggtggaaggatgagaaggggctacacctggaccagactgagacacaactgaaggagccctggatattgcccaggatctgtggacctagagactaagaagctgtcatggccctggggcatctctgctgcagctaaacttgatttttaggttttctcctgttggggatgaacaataatcaggattgagggccaggttcctggcctgcagtttcagaaatgtctttgggtttctttctatatctctagggcagggtttcttagtctcagtactcttgacatttggagctggataattctttgttgcagggggctgtccagtacattgtaggatgtttagcagaattcctagcctctacccactagttgccagagcatccaccccctcagagtcccagttgtaacaaccaaaaatgcctccagatactcccacatgtccactagagggcaaaattgtccctggttggaaaatgaggtacttaggagcagtcagaacggcaagaattaggagaaaaaggtcaataaagctgaggggccctctcaggagctgaaaagtatccactgggtctggcatttactttggatcttccagcagatctaggggagcggcaagggcagaagccaaactgcggaagtgaggagtgagtgaggatgatgtggagtcagtgagggaggctcttcctcaaggattcttggttgtgaagggaaggattgaagtgagatactcagttgagagaggattttttttctttaattttcttttttttcctgagacggagtctcgctctgctgcccatgctggagtgcagtggtgcaatcttggctcactccaacctctgcctcccgggttcaagtgattctcctgcctcagcttcctgagtagctgggactacaggcatgtgccaccacgcccggctaatttttgtaattttagtagaaaccatgttagccaggctggtctcaaactcctgacctcaggcaatccacctgcctcagcctcccaagtgctgagattacaggcatgagccaccgtgcccagccggttcttttgaatatgggagaaatctgagccatggagaaggagatagctgaagaaagcttgaaaatgcaaaacacttgtgaaagaatgtggtagattttgcatactgtattggaggcatggcccctgtattgttaaatgaagaaaaaatcatatgacaaggttgcttttgtttttgtaaaacaaaactccccaaagttctgtgagtgtgtatatgaatgttacaaatttatgtatttatgtttgtcttacgttacagttttatgtttgtgtaagcatagaaaatggtctggaaatatatttagcaaacaaggtacctggggtgggggtgggctcagggtcaggggataggaggcagcagggtatggggatatagggtgggatggggtatgggacagctgggtggagggcttttctttctttatatacctctgtgttatgaaagtaaaataattattcacaaaaatacaaaaataatgaagtgaatttactggcttgggtggcttgcaagggctgccttttcctctggaacaggaggaaagaagaagagcagacattgatctataaggcaaaggggtgtgaaaacaagggggcacctgcttgtgtgtttgtgttgtggacaaagtgcttggaagtaagtgaagatggaaaggcagggcaggggtgggatcctctttgggtactttggggaataactacggggtaaaggtggggaatggaaggagagaaaaggatcgtcaagctgcatggagtaggataagacccaactgaaagaaaactaagggggagagcagtggcagtctgggaggaaaagaaagttggggtggcagatccaagtggggcagcacacccaaatttctctctcaggtgttacaaccgtccacttactcattacagcaaaacagtacatacaaaaggggaaaaggcaggacgggcgggtagagttctgggcctgactccttcctgccccttctaggcctgtagcatatctcttcatttgttgctccactgtggcgaagctgaaaactagctatattttattttcaggtcaatcagctgggagtgcaatttctagaaacctaatctttacctgcaaatacctaagagtttaaagcaaagttcgacttacttcaggtctttgattttacagtatggagtacgcagtgcttggcagagcaggtgtagctgacacactggcaaactgcgcagctgaaaggacctaaaagagatgaggaaataaaaagtaatttaaaataaaacttaagtaaaaggcttatttggcttttgttaccttgctagtagcactaatttaccccttcccaaaaccttgagacgtattatcccattttgcagataaggaaattagggcacaaaaagtaatctgctcaaggtcacataggtaggtacagaactgaggtcattactcaggtctgagtccaaaaccatgttactatgtgccaggcactgaggtaagcactttattttcacaaattatcttatctggcccttaatccaataacaagtattataatcaccattttccacatgctctgagtcgtcaagtgacttgcccaagctaactttacaatataactggttcttggttgtcggtactaatagaagaattcataacaataattaaaaaccaggaaagctcaatagtaaactcttacatagccaatacgcttgggaaagaagaatgttgggttaaatttttgataagagtttaagccctctgataaaggcaataagggttataggggaggacgccatctaaggttgactttctggaaacccagaatgaaccagaagaccctttgtttccatcagtgtttcaactttaaatgtattggtccattattttactttataatatacaactggaataaggctgtatattatatacatatacagaattggtcaagaccttgtagacaaggtctttcataattctgagtccgttaaacctctcttaaactagagagggaaggaactagaggtccttccctctctagttccaaacacaaattcttgttaatgcctccctccctctcatttccctcaaacacacataccccatgctcatttccacctttatgctattccccacacaagaaatacaactataagggacacaacttgagttatttcattcctcaagtggagctttctgctgacccctctcctcccagtcccctgcccctcaactggcctgaaaactaagggagaggcattatcaatcttaacccagatattgagaacagacttacagcattttctagataacacaggtataagtcttctttgctgctttagtcagtaagccagtaggactgtattttatggtatacagagtccatattataaaagtaacttacctaagcctctttcaacttcagctcatgaccttctgtgaagttgcaagctctgatggaaataaccaggatttatagcaagataatacaagagtgtacctctgccccttactaacctgaagttccttgaggcctcagtgatgaagtatatttagaggagagtgacaaccaatcaaatgttacgtttatacctttttccagaatggtcattacaccaaaatagcagagtcttcaacttgatgaccttacatgctcataacactttagaattacaaaccacatccacacagtgacaatgaatactaatacacacacacacacacacacacacacacacacacacactgactactacagtgcctgttgtctgggaaggataaaaactggaggaaagacatggatatacgcactgattaagtgttaaggctggtggcacgaatgttgaggctcactcttcctcctcaaatccaagtaggtgctgacacttcagagacactgacaggtgactgtgactgctttttacacagaaggacataaccagaatgtccatttttgtataggtaggttgaagcagtataattgactgtaaatcatcaattatcctttttgcatattcttcttcctgaatctcatacaaacagtgaaacaggtccaccggctcaatctgtaacctagaagacttatcctttatttctctctcagtccacttcagtaactcctcttgaagtcctggggaaacttttcttccaaaagtagtttccacagcctttccttttcctttatgtaagaggccaaataagaattatatcattagtgatgaaaaaccttttccatattgttggaacatttcttgccacattttctctgcttgataaaaaaacatccagctattgtcattcttcagggcatggaagacagcagtcaagaactcttggaaactgaagtgaaggaaagtgtagacactgacagctccttcagcctttttcaaaaagcgactgagaaaagtgcagttggtatcacacactcctatcccatgtcttctgaggtcactgactgcaaacaaaacctgatgattttgcagaccctctgcagccaaacggcaaagaccccacaggcaactttgtccctcccatactgagatacctgtaagggttttgaggcacttggaaaagtagaataaatacacatcagtcatggtctgaagtgacctcaagagagtcctgtcaccatctccctgtgactgcaggacattgcatatcatccaggagacgatgggaagtgaagacataatgtcaaggtcttcattctctcaaagatcataaaagactttcattgttgtattagcacctgaaaactggctcaataaatatgctctcttttcggtatctgtaaaccataatatctctgcctggataggttgttttaacagagagtggagcttcttcatggctgtaggccgggcagttatcaggagggaggattcggggaacagttttttcctcacaaaactgcacaagagactctctactggcctcctctcctgggggtgaacactaagatcctcttcttggtcaccaacagggtcctgcagctcaggaaatctgtcgagaatgagcagaatctttggatatatgagaatagtgtccaagattggtccatttatattttgaaaagtgttagtataaggtcagcagaactaaggttagcaatatggctgatttcaatgcagttgacgtagatgagatagtcacacctgcctggagtaaccgttcctgctgcccagtcaaacatgaacttgtgcaccacagctgtttttccagtcccagcacatgcctgaagcaccacagttcggggtgagctggagccctcttcattagaatcaaatacatgttccatgtcaataaaatgatcttgttgaggaattccatatggtgtctcttctgatataccatggtcttttacaagaagcagtcgtgactctatatgcttgccatgctgataacatttatcaactcctatctttaggtatttttcttttagatgttttctgaatacttcctggtaatctaacatggtgacagcaagagttagtaattatagaatcctagacaacaactctaactagtacctccatcaccaccatctccacttagatgtctcaaaggatcctcaactttacatgtctaaacccgagttcttgatttttatactcttctgtccccgccaaaaaaccctccccaggcatctcatctcagttaagtggtgctatccagttgctcagaaaaatgttatgagtatttttccttcaatcctctacatccaatcaattagcaaggcctaacatttatattttcaaaataagcctcaaatccatttatttaccaatatatcctcaaatacctcccaagtccagggcactgtcacctctttcctagactggccaaatagcatcctactaatctattcttgcccatctactggttccttcctatgcagcagccaaaacagtcttctacagataccaattagatcatgtcacttccctgcccaaaatccttcaagagcttttcattgttcttgctataaaatccaaaatcctcatcctacaaggtgttctcatgatctgggccttctctacctcccctccctagcctcattttttatcattctccttttcgctctctacgttagagccacactggcctactttcagttctcaaaaatgccatgttctctcctacttcagagactttgcgctagctaatctttccacctggaacattcttcctcctgctcttcccatgaaaagctctttttcatccttctgatctcaaatattacttcctagaattcctaggattgcttcctagaattcctaggatttgtttgaccacccaatttaaaggagatcctctctactatttcccttcgcagcaccatatatatatatatattttttgagatggagtcttgctctgctgcccaggctggagtgcagtggtgcgatcttggctcactgcaagctccacctcccaggttcacgccattctcctgcctcagcctcccaagtagctaggactacaggcgcccgctaccacgcctggctaattttttttctatttttagtagagacatggtttcaccgccagcaccatatttttacctttatagctcttatcgcaatttataactgtcttgttcatttactttttcactgtcttttctactatacaataatacacatgaagacaggggccttatctgtctatctcctttacaataagtaccctgagtacctggcactgagcccagcacataacacacactcaataaatatttattgaatatggctataaatgcttttggattacaaacaagttatttattattgcctattctgtgacagatactgttaggacctttatgtacatttctgatttaattctcacaataatcccatgaagtaggtattacctacatttgatagttgaggaaatagaaacttataatcagggccaccttcatgagtgtgcagtctgtgcagtcacacaggtctccatgctcagaaggatgtatacttggtttaatgctctgctattgctgtcttgaaattcttaatacttgacaaagaggttttgcattttcattttgtactgtatcccacaaattatgtagccagtgctgctttacatagctttaggtaatttgtccaatgctagtaagtgacatcaagtacaaacttacgttaagtgaatgtctatgccagtatttcccaaatcagggttccctggaaaactgtctgcaagacattaataagttgaggggagtgcaccctgtagtctcttagagtttctcaatgcttattagcatatgaaaggctcttgtactagcatatgaaacattctttaactctcctacagttgaaaaaggctgtttaactgtgtttaacccaaagttttctggtcttaaatgactacagaacccttttctaacagcaaagttactaattattgcataactgttcctagaactcagtttggggaacgctaatagagataacggttggcaaacattttctgtaaaatttcttaaatagtttaggcttttcggtctctgttgcaattgctcaactctgccatcttactgtgaaagtagccatagataatatgtaaacaaatagctgtattccaataaagctttatttacaaaaataggcaactggttgggtttgactcactagctatagtttgctggccctgatctagataattccagaagaggactggccttttctcagaataaaattttctacatctagctcttgaccaccaccaccagtggtcctcccagtattcgaataggtatttgaatatattctatatgatatagaagccctatttgtcgtgacagtttggggctttatagttgccaaaaaagcaatgattgttgccccagtgaataagagggaaaaattagagaggagcagggcggggtagggatgggtagttgggttcttggaaaatactattctcaaaacagaaaaagagagtaaaatagaaaagacatctacctgtaagctctttacatgaaaacgaagccagagaatttgaagcaactgtggaagaaagagttaaagttaggagtagcacaaatacacctttataccaaaacctgaaatgcacagaaattttgccacactgtaacagccattcatgctgctccccaaacagaaatacaacaaaggaagtaaatcatctcacatcttttctaacttactcacaaaggtattttatagctaatacgcaacataaaataaaacataagaatttcccagctgggcacagtggctcacacctgtaatcccagcgctttgggagtctaaggtgggaggatcacttgagcccaggagtttgagaccagcctgggcaacatagggaggtcttgtctctacggaaagtaaaaaaatagccaagtatagtggtgtgcacttgtgttcccagatacttgggaggctgagccaggaggatcacttgagtctgggaggtcaaggctgtagtgaactgtgattgcatgactgcactctagcctgactgacagagtgagatcctatctcttaaaaaaaagaatttcccttatgcatatatttagctgtggatattttaatttatatcatcaataaggaaaattttaggcatgagcttaaagattcatacattatttgaagtgattgttttctgctattttctttccactgaatattaccctcttgcttctgttgtggcttccgttgagcctaacttgctaatgggaaagaacagggctttgctgaatattaatttgatagatatataagatatatatgatgatctacattcaaatacatattttacacacactcaatccagatactttacatatagatatataaataagaatacacaagcacacacacaactccacattcctataattgtttacttcttgcacacttttaaaagcaagagtaagattagagtggagaagaagttgtgactagatgggtgctaacaggtgaatgggaagaagcagggtgtggacgggcagacattagactgtcacagaaatgagcaggcaagtgagtggtctgttgagaataactggtttctgttccccacaactaaacattccttggatttcaggaatcagccacaagaggcaggactccagcaatcttcactctttgttcttctgtgctgtctcctgtgaaaagctctggttacattaaaggaagagacttggagtcttttataattgtaaatgtttgggggattatggaaaacaacagaaaccacagttgcctcttctccgtctttatccttattttaggcaacataaaaattgtggagacagtttcaagagattaatgggtaaatactgtatccaagtaattcacatctaacaacattttaaagtttcagaagaatctccaagggtatgaggaaaagaaacaggagaaagagaatgaatagacttacctagtatataccatttcttatttcattcagttactcaccattctctccagacaataaactccaggtacaagcaagttccatatattttcttttcttctgattgttcatcctggcaaatcaagaagactgtaatccagaacagcaacggtgactataaggcctagtggatgctcagagtaaaaaagtaactcaagaaatactcttcattcaaggcattagagagctggagaaaagagaaggcccaataaccaagcagacagctgaggtagcaccctggggaatcacatgaagacagaccaaaactaacagtcttcaacttgaagagaaaaaaaagctgaaagaggatagaatgtgtataaagttttgaagggtacaaatatggagaatgtcaaattgggctctgaattgagtcactaagagaagtataggaattaggtagcatacttctaatgtctgagatcaagagaagtaagaatgatgatgtccttccacaacatatttttggtgccatcaataaagggagaattctaagactacagattggaatactgtggtataagagaaataatctaaagaatcagaagacctgggtcctagctccatttctatccatccatggacctcgaataagattcttctcctttctgggagaacggtctgctttactattttcaaaatggttcaaggaacgttagaccaggtttctttccaggtttgacactgtaagatcagtagttctcagtcttagctacacattagaatcttgaaatattacttatcaccttctaatatatttgataatttacttatgtattaggcttattgttctttgttagtctttcccacctaaattgaattactggcccctttctcaacctttgtcatgaactttgcaaatccgcacacaaaaaactggagcttattttcctacctcctgtctttgagctcattcatgagactttggttaatggagtgaaaccagagttggacatgtcatctcttatgattcatgaaagaagccacagagaaacgagacccagctagttcactggtctaaggaggatgagaaatacatgaagcagagccaccatagcttacccacagtactgcggcaaggaaagtacagtgaccccagcctgaataaagttacccaacagagccctctttaatcatctgagtcccagctggcctccagatctgtgaagataaattcttaataagtgattaatttttcatgccacggaaatttcgtggttattgttacacatcactgtggcaatagctaactgatacatcctgctagaatgtaaatgcctagaaagtgtttggcacagagtagacattcactaaatatttatcaaataaattgaatgagtgaatagctttttaaaaaaacccaatgacactgacttccacaatggttgaactagtttacagtcccaccaacagtgtaaaagtgttcctatttctccacatcctctccagcacctgttgtttcctgactttttaatgattgccattctaactggtgtgagatgatatctcattgtggttttgatttgcatttctctgatggccagtgatggtgagcattttttcatgtgttttttggctgcataaatgtcttcttttgagaagtgtctgttcatgtccttcgcccactttttgatggggttgtttgtttttttcttgtaaatttgtttgagttcattgtagattctgggtattagccctttgtcagatgagtagattgcaaaaattttctcccattttgtgggttgcctgttcactctgatggtagtttcttttgctgtgcagaagctctttagtttaattagatcccatttgtcaattttggctttcgttgccattgcttttggtgttttagacatgaagtctttgcccgtgcctatgtcctgaatggtaattcctaggttttcttctagggtttttatggttttaggtctaacatgtaagtctttaatccatcttgaatttatttttgtacaaggtgtaaggaagggatccagtttcagctttctacatatggctagccagttttcccagcaccatttattaaatatggaatcctttccccattgcttgtttttctcaggtttgtcaaaggtcagatagttgtagatatgtggcgttatttctgagggctctgttctgttccattgatctatctctctgttttggtaccagtaccatgctgttttggttactgtagccttgtagtatagtttgaagtcaggtagcgtgatgcctccagctttgttcttttggcttaggattgacttggcgatgcgggctcttttttggttccatatgaactttaaagtagttttttccaattctgtgaagaaagtcattggtagcttgatggggatggcattggatctataaattaccttgggcagtatggccattttcacgatattgattcttcctacccatgagcatggaatgttcttccatttgtttgtatcctcttttatttcattgagcagtggtttgtagttctccttgaagaggtccttcacgtcccttgtaaggtggattcctaggtattttattctctttgaagcaattgtgaatgggagttccccaaaggaatataaatcatgctgctataaagatacatgcacacgtatgtttattgcggcactattcacaatagcaaagacttggaatcaacgcaaatgtccaacaatgatagactggattaagaaaatgtggcacatatacaccatggaatactatgcagccataaaaaatgatgacttcatgtcctttgtagggacatgggtgaaatttaaaatcatcattctcagtaaactctcgcaagaacaaaaaaccaaacaccgcatattctcactcataggtgggaattgaacaatgagaacacatggacacaggaaggggaacatcacactctggggacggttgtggggtgggggggaggggggaggcatagcattgggaggtatacctaatgctaaatgatgagttaatgggtgcagcacaccagcatgtcacatgtatacatatgtaactaacctgtatattgtgcacatgtaccctaaaacttaaagtataataataaaaaataaaaaaaaacccaatgacttgtccacattactgttaaattatatcagaatctttgatgatgaggctcagcatcatttttttaaaacttcgcaggtgattctagtacaaagccagagaagagagccactcttataagatttggttatctttgttagagaaaagtgcgtgttggtgaaacatataagccttagaatcaagcaaatgtcttcaagtactgactctaccacttactgactgtgtgacaaccaggaaattaatatttccaggtcttagttttatcagttaggtagggataatgacggtactttctgtataaggttttattaagattaaatgagataatgtaaaatattcagcacattgcatgctacacagtaggggctcaagaatcctaaaccatagctaatgtttgtgttgctgtatcatcttatatagagtagaaatttttttaaattctggtagaccttacgtaagtcccatttctaccctttttagcaacatgaccttgagtaaattacttaaactctctgagatttcggtaaccaaactgtaaaatgtggttgataataatacctacctcattaatttgttgtgaggattaaataagatgatactcataaaacactcaacacaggccctggtgcaatataaatgataaatgttacagaaaaaataagatggcatttattgtaactttgacagaaagatgttacattccattaaaatcttcacataacacgttcattcttatgaaatggaatgttctcagcacagtgttatagtctcacaccctacactcttcccaatctctaggaatatttttttgcactccccaaaataggaacaatcctccagctacaattactgtgtagtaagtgctcctgcccttgggcaacagagctggagggctgtatggcctctcactctctttctgggcaatctacaccatgcccattatttcagttatctttatgattcccaatcgtttatcctagtctagccctctcctctgagattcagacttatatatttaaaggtttactcaacatctccacttggatgttgacaccttgcttttttgtctcctttggtaactattgcttggtttgtccagcattctttcactgaccttgttctgatgaaagttcccatccctcttagtgaaataatcagattccccatccttgaatttttaaacctgactggggactatagagactgaggttctgctacctaaatgtctcgagcttgatggttcctgacctccctgaggccttgtttttcagcatgtcaatttagatttcagtaattccaatatccttctaaatattcctttttgtttaagttatgcaaaatcaattgctgtggtctgcaactaaagaattctgatttaaaaattataccacagagccagttacaatcaccagacctttggagggaattatgaggggcattttataaccggttattagtctcggctagactaaaggctgtgaggtggcccgaattccaggataggaaaatagtatccattattctaggatttccaccgatacatatcagatatttatacaaagtactaaaaggtaccctcttcaagaagacaaatcatgctgagatgtgtcctctaagtagttgaactacaaaatggcgaaatggcgctctcttctcttggatggggcaggaccaaactaggatatacaagttagagagcagagtatgggttaattgcagtccccattcacactcttggtcctgtgccttttaagtcaacaaactgaaaaactttatatggtgactctacatggtatgcatgcagccaaaaataggggaaagaaatgctacaattttttccaacctttattaagatatagctgaaaaataaaaattgtgtatatttaagatgtacaatgtgatgatttgatatatatacatacacattgtgaaatgattaccacaatcaagctaattagcacatccatcacctcacatgattaccatttgatatggtttggatgtttgtcccctccaaatctcatgttgaaaggtaatcagcagtgttggaggtggggccaggtgggaggtgtttggatcatggaggtggatccctcatgaatggcttaggtccatccccttgatgataaattagttcttgctctgagttcacatgagatctggttattcaaaagagtgtggcacctccccctgtcttcctctggttttcgccatttgatgagcttgctcccccttctccttctgccatgattagaagcttcctgaggccctcatcagaagcagatgctggcatcatgcttcctgtacagcctgcagaaccaggagccaattaaaccacttttctttacaaactacccagcctcaggtatttctttacagcaatgcaagaacgaactgatatagaaaactggtactaaggttggggtattaatatgaagttacctgaaaatggggaagcagctttggaactgggtaatgggcagatgctagaagagtttggaggtctcagaagacagggaaaacgagggaaagttgggaacttcttagagactggttaagtggttgtaacaaaaatgctgatagaaatatggacagtgaaagccaggccgatgaggtcttagatggaaatgaggaagttattgggaactggaggaaagatcacccttgttatgccttatcaaagagcttggctgcattgtgtccaggtcctaaggaaccgtggaaggttgaacttaagagtgaggacttagggtactggtggaagaaacttctaagcagcaaagcattcaagaagtggtgtggctgtttctaacaacctatgatccaatatgggagcaatggaatgacttaaggttgggactcacatttaaaagcagagtccaaatgtttagaaaatgtgcagcctggccctgtggcagagaaagaaaagtattttcaggggaagaatccaagcaggctgcacagcaaccacttgctagagagattagcatgactcaaaagagagccaagtggtaatatccaacacaatggggaaaaggcctcaaaggcattttagaagtctttgggacagcccctcccatcacagtcccagaggcttagtaggaaataatggtttagggggccaggcctggggcaccactggtttgtgcagcctcaggacacttcaccacccatccaagcccctctagcaccagctcaaagggccccaagtacagctccagccactgcttcggaaggtacaagccataagccttggcagcttctatgtagttttaagtcagcctaggtgacagggtgagatcctgtgtttaaaaaaaaaacaaggaatgaagtactgatacatgttacatgcaggtgatccttgaaaactttatgctaagtgacaaaagccagaagcaaaatgccacatattgtgaaattccatttatatgaaatatccagaataggcaaatccatataatcagaaagtagattcgtggttgccagaggctgcagtgggggaaggaagaattgctagtgattgctaacaggtatagggtttctgtttggggtgttgaaaatattttggaactagatagttgtaatagttccagagcattgtgaatatactaatatcataaaaaagtacacttcaaaaaagaggtaaattttatggtatgtgaatagaatcaaacaatatcaaataaataaaatccataaaaatgcaattataaaagaaaatgggaaagtggaaacaacccaaatgtccatcagtggaggaatggataaataaaatgtggtctatacatataataggctattattcagccttaaaaagaaggaaattctgacacatgctgcaacatagataaacctagaagacactatgctaagtgaaataatccagacataaaattgcaaatattgtgtgtttacactgatataagttacctaaagtagtcaaattcagagacagaaagttacgaggggcttgaggaaaagggtaatatggagtaagtgtttaatagttgtgaactttcagtttgagaatggagtaattgtttaatagttgtgaactttcagcttgagaatgaaaaggttctggaaatggatggtggtgatgattgaacaataatgtaaatttacttaatcccagtgaactctacacttaaaaatggtaaaaatgtcaaattttatgttatgtatattttaccacaataacaataataggcaattgaaaaagaaatgaaaaaaaaatcccatttataatagccaaaagtaaaattaaatacctggagttaaccaaagaagtgaaatatctttacaatgaaaactataaacgctgatgaaagaaattgaagaggacaccaaaaaaggagaaaatattccatgttcatggattggaagaatcactattgttaaaatgcccatattacccaaagcaatctacagatacaacacaatccctatcaaaataccaattacattctgcacagaaatagaaaaaacaaacctaaaatttatatggagtcataaaagacccagaatagccaaagctacactgaacaaaaagaataacactggaggaatcatattacctaacttcaaattacactacagagctatagtaaccaaaagggcatggtactggcaaaaaaaaaaaaacaaaaaaaaccagacacatagaccaatggaacagaatagagaacccagaaaaatatccattcacctacaatgaactcattttcaacaaagatatacattggggaagacagtctcttcaatacatagtgctgagaaaactggatattcatatgcaaaaaaatgaaacttgattcctatctcttgctttatacaaaaataaaatcaaaatcaattaaagaattaaatctaagacttcaaactatgaaaacactaaaataaaacactggggaaactgttcaggacattggtctgggcaaaaaatttcttgagtaataccccacaagcacaggcaaccaaagcaaaaataggcaaatgggatcacatcaaattaaaaagcttctgcacaacaaaggaaacaacgaagtgaagatacaacctacggaatgaaaaagaatatctgcaaactatttatctgacaagggattaatatgcaaaatgtacaaggagctgaaacaactcaataggaaaaaaatcaaataatctgattttaaaatggctaaaagatctgaatagacatttttcaaaacaaaacatacaaatggcaaatagacatatgaaaaggtgctcaacatcactgatcatcagagaaatgcacatcaaaactacaatgagatatcatttcacctccattaaaatgacttctgtccaaaagacaggcaatagcaagtgctggagaggatgtggagaaaagggaatcctcgtacactgtcgatgggaatgtaaattagtaccactaacaaaaacagtttggaggttcctcaaaagttaaaaatagggctaccatatgatctagcaatccaactgcttggtatatacccaaaagaaaggaaatcagtatatcaaagtgatatctgtactctcatgtttattgcagcactgttcacaacagccaagatttggaagcaacattaagtgtccatcaacagacaaatggataaagaaaatgtacatatcacaatgtagtactactattcagccacgaaaatgaaaagagatcctgtcatttgcaacaacatggatggaatgggaggtcattatgttaaatgaaataagccagacacagaaagacaaacatcacatgttctcatttactatgggatctaaaaattaaaacaattgaattcatggagatagagggcagaagaatggttaccagagtctgggaagtgaaggtggttaatgggtacaaaaaaattgatagaatgaataagatctagtatttgatagcacaacaggctgactatagtcaatagcaatttaattatactttttaaaataactaaaagagtataattggattgtttgtaacacaaagggtaaatgcttgaggtaatgagtaccctatttaatctgatgtgattattaagcattgcatgccagtatcaaaatatctcatgtgcctgataaaaatatacacctactatgtacttgcaaaaattaaacattaagaaaaacaaataaaaaacaaaaataattaagatgaaattaataattactgaaatagaaaacaaacaataatagaaccatggagtagatggataagaggaaataatatttatttgaaaagattaatagaatacaaaagtttttggcaagtatgatttcaaaaataaagaaggcacaaattaacattaaaaaataaagggtataatgtgggtcggcctgatactatcaattgaaggctttaatggaacaaagactaatctcccccaagcaagaaggaattttggagtacagacaagatggccaaataggaacagctccggtctgcagctaccagcgagaccaatgcagaaggcaggtgatttctgcatttccaactgaggtactcagttcatctcaatgggactggttaggcagtggatgcagcccacagagtgcaagcaaaaacagggtggggcatcacctcacccaggaaatgcaagaatccaggggacctcccttccccagccaagggaagccatgaggaactgtgctacccggcccggatactacgttttttccccatggtttttgcaacctgcagatcaggagattccctcatgtgcctacaccaccaggaccctgggtttcaagcacaaaactgggcagctgtttgggcagacaccaagctagctgcaggagtttttccatatcccagtggcggctggaacctcagtgagacagaaccattcactcccctggaaagggggctgaagccagggagccaagtggtctctctcagcgggtcccactcccatggaacccagcaagctaagaaccactggcttgaaattctcgcagctggcacagcagtctgaagtcaacctgggacaatctagcttggtgcagggaggggtgtccgccattactgaggctttagtattcagttttccgctgacactgctaaggaggctgggggatttgggctgggcggaatttaccacaacgtggcaaagtggctgtggccagactgcttctctagattcctcctcatggggcagagcatctctaaagtaaaggcaacagccccagtaaggggctcatagataaaacccctatctccctaggacagagcacctgagggaaggggtggatgtgggtgcattttcagcggacttaaactttcctgcctgccggctctgaagagagcagctgatcctgacgaggattctcccagcacagcactcgagctctgctaagggacagaactgcctcctgaagtgggtccctgatgcccatgcctcctgactgggagggacctcccaacaggggtcaacagacacctcatacaggagagctctggctggcatcaggcctgtgtccctctgggacgaagcttccagaggaaggagtaggcagcaatctttgctgttctgtggcctccactggtgatactgctgttctgcagcctccactggtgatacccagttgaagagggtctgaagaggacctcccacaaactgcagcagacctgcagaagcgaggcctgactgtgagaagaaaaactaacaaacagaaagcaaaagcatcaacatcaacaaaaaggacccccacacaaaaaccccatccaaagattatcaacctcaaagatcaaaggtagaaaaatccacaaagatgaggaaaaactggcgaaaaatgctgaaaattccagaaaccagaatgcctcttctcctccaaatgatcacaactcctctctagcaagggcacaaaactggatggagaatgagattgacaaactgacagaagtaggcttcagaaggtgggtaataacaaactactctgagctaaaggagcacgatctaacccaatgctaagaagctaaaaaccttgataaaaggttacaggaattgctaacaataataaccagtttcgagaagaccataaatgatctgatggacctgaaaaacacagcatgagaacttcgtgaagcatacacaagtatcaatagctgaatcaatcaagcagaagagaggatatcagagattgaggatcaacttactgaaataaggagtgaagacaagattaaagaaaaaagaatgaaaaagaacaaacaaaacctccaagaaatatgggactatgtgaaaagaccaaacctacgattgattggggtctctgaaactgatggggaaaatggaaccaagttggaaaacacacttcaggatatgatcctggagaacttcccccacctagcaagacaggccaacattcaaattcaggaaatacagagaacactattaagatactcttcgagaagagcaatcccagacacataatcatcagattccccaaggttgaaatgaaggaaaaaatgttaagggcagccagagagaaaggtcaggttacctacaaaaggaagcccatcagactaacagctgatctctctgcagaaactctacaagccagaagagagtgggggccaatattcaacattcttaaagaaaataattttcaacccagaatttcgtatccagccaaactaagcttcataaatgaaggagaaataaaatcctttacagacaagcaaatgctgagagattttgtcaccaccaggcctgccctaaaagagcttctgaaggaagtactaaacatggaaaggaacaaccggtacctgccactgcaaaaacatgccaaattgtaaagaccgtcgatgctaggaagaaactgcatcaactaacgggcaaaataaagagctagcattataatgacaggatcaaattcacacataacaatattaaccttaaatgtaaatgggctaccagactggcaaattggataaagagtcaagacccatcagtgtgcggtattcaggagacccatctcatgtgcaaagacacacataggctcaaaataaagggatggaggaatatttaccaagcaaatggaaagcaaaaaaaagcaggagttgcaatcctagtctctgataaaacagactttaaaccaacaaagatcaaaaaagacaaagaagggcattaaataagggtaaagggatccattcaacaggaagagctaactatcctaaatatatatgcacccaatacaggagcacccagattcataaaacaagttcttagagagctacaaaaaaacttagactcccacacaataatagtgggagactttaacaccccactgtcaatattagacagatcaatgagacagaaaattaacaaggatgttcaggacttgaactcagctctggaccaagcagacctaatagacatctacagaactctccaccccaaatagacagaatatacattcttctcagcaccacatagcacttattctaaaatcgaccatataactggaagtaaaacacttctcagcaaatgcgaaagaacagaaatcataacaaacagcctctcagactgcagtgcaatcaaattagaactcaggattaagaaattcactcaaaacctcacaactacatggaaactgaacaacctgctcctgaatgactactgggtaaataacgaaattaaggcagaaataaagaagttctttgaaaccaatgagaacaaagacacaacataccagaatctctgggacacagctaaagctgtgttaagagggaaatttatcgtactaaacgcccacactggaaagctggaaagatctgaattcgacacctgaacatcacaataaaagaactagagaagcagccgggcgcggtggctcatgcctgtaatcccagcattttgggaggctgaggcaggcagatcacaaggtcaggagatcaagactatccgggctaacacagtgaaaccccgtctctattgaaaatacaaaaaaattagccgggcatggtggcaggcgcctgtagtcacagctactcaggaggctgaggcaggagaatggcatgaacccgggaggtggagcttgcagtgagccgagatcatgccactgcactccagcctgggcgacaaagcaagactccacttcagaaaaaaaaaaaaaaaaaagaactagataagcaagagcaaacaaattcaaaagctagcagaagacaagaaataactaagatcagagcaaaagagaaggagatagagacacaaaaaacccttcaaaatatcaatgaatccaggagctggttttttgaaaagattaacaaaatagattgaccactagccagcctaataaagaagaaaacagaagaatcaaatagacacactaaaaaatgataaaggggatatcaccactgatcccacagaaatacaaactaccatcagagagtactataaacacctctatgcaaataaactagaaaatctggaagaaatggataaattcctggacatatacaccctcccaagactgaaccaggaagaagtcgactccccgaaaagaccaataacaagttctgaaattgaggcaatgattaatagcctaccaaccaaaagaaacccaggaccagatgaattcacagccaaattctaccagaggtacaaagaggagctggtaccattctctctgaaactattccaaacaatagaaaaagagagactttttcataactcattttatgaggccagcatcatcctaataccaaaacctggcagagatagaacaaaaaagagaaaatttcaggccaatatccctggtgaagatcaatgcgaaaatccccaataaaatactggcaaaccgaatgcagtagcacatcatgaagcttattcatcacgatcaagttggtttcatccctgggatgcaagcctggttcaacatatgcaaatcaataaacataacccatcacataaacagaatcaatgacaaaaaccacgattatctcaacagatgcagaaaaggcctttgataaaattcaacatcccttcgtgctaaaaactctcaataaactaggtactgatggaatatatctcaaaataataagagctatttatgacaaacccatagccaatatcatactgaatgggcaaaagctggaagcagcccctttgaaaacaggcataagataagcatgccctctctcaccactcctattcaacatagtactggaagttctgaccagggcaatcaggcaagagaaagaaataaagggtattcagtcaggaaaagaggaagtcaaattgtctctgcttgcagatgacatgactgtatattcagaaagccccattgtctcagcccaaaaactccctaagctgataagcaacttcagcaaagtctcagaatacaaaatcaatgtacaaaaatcacaagcattcctgtacaccaataatagacaagcagagagccaaatcatgagtgaactcccattcacaaattgctaaaaagagaataaaacacttaggaatatagatgtgaaggacctcttcaaggagaactacaaaccactgctcaagaaaataaaagaggacacaaacaaatggaaaaatattccatgctcatggataggataaatcaatatcatgaaaacagtcatgctgcccaaagtaatttatagattccatgctattcccatcaagctaccatttactttctttgcaaaattagaaaaaaactactttaaattgcatatggaaccaaaaaaagagcctgtatagccaagacaatcctaagcaaaaagaacagagcagaaggcatcaggctacacaacttcaaactatactacaagactacagtaaccaaagctgcatggtactagtaccaaaacagatatatagaccaatggaacagaatagagacctcggaagtaagagcacacatctacaatcatctgatcttcaacaaacctgacaaaaacaagcaatggggaaagaattccctatttaataaatggtgctgggaaaactggctagccatatgtagaaagctgaaactggaccctttccatacaccttatacaaaaattaactcaagatggattaaagacttaaatgtaaaaccaaaaagcatataaacactagaagaaaacctaggcaataccattcaggacataggcatgggcaaacacttcatggctaaaacaccaaaagcaatggcaacaaaagccaaaattgacaaatgggatctacttaaactaaagagcttctgcacagcaaaagaaactatcatcagagtgaacaggcaacctacagaatgggagaacatttttgcaacctatccgtctgacaaagatctaatattcggaatctacaagaacttaaacaaatgtacaagagaaaaaacaaccccttcaaaaagtgggcaagggatatgaacagacacttctcaaaagaagacatttatgtagccatcaaacatatgaaaataagctcattatcactggtcattagaaaaatgtaaatcaaaaccacagtgagataccatctcacactagaatggcgataattaaaaagtcaggaaacaacagatgctggagaggatgtggagaaataggaatgctttcacactattgatgggagtgtaaatcagttcgaccattgtggaagacagtgtggtgattcctcaaggatctagaaccagaaataccatttgacccagcaatcccattactggatatatacccaaagtattataaatcattctactataaagacacatgcacacatatttttattgcagcaccatttacaatagcatagatttgaaccaacccaaatgcccatcaatgatagactggataaagaaaatgtggcacatatacacatgtggaaaatgtagcacatatacacatggaatactatacagccataaaaagaatgagttcatgtcctttgcagggacatggatgaacctggaaaccatcattctcagcaaacaaacacaggaacagaaaaccgaacaccacatgttctcactcataatgggagttgaacaatgagaacacatggacacagggaggggaacatcacacaccggggcctggcaggggttggggggaaagggagcaagataattaggacaaatacctaacacatgcggggcttaaaacctagatgacaagttgataggtgcagcaagccaccatggcacatgtatacctatgtaacaaacctgtatgttctgcacatgtatcccagaacttaaagtaaattttatttaaaaaagaatcaatggaaatgcagaaaagatcagtgaaaatatgaactggcataattatcaatttgattgccacatatgtcttctaagtgtttcactttctattctgctactgcaaaagtttgtgtcagaatctatttaaaataaatacaacacataatctcaaaaaactgaaaggggaccaaactacagaaagagactataccaaaaaattattttaggaatactgtataacttttacaccaataactttgaaaatctaggtgaaatggataatttctaggaaaattagtccaagaattggcctaagaaatagaatacttaaataaacctattaatcacattagaatgtataatgataatcaagaatctaccttaaaagtcaccatttccagaaattttgtgggtgtttgacaaaaccatctaggaacagattaatgaaactttccaaacattttttccatattaaaaaaatggtaaatgacaccacacagctataaggctggtataatcttgataccaaaactgacaagtaaagggaaagaaaattatagcccatctcacatatgaaccttgatataaaaacgtataaccttgatacaaaaattggaaaagcacaagagaactacgggccagcatttttcataagagtgctaatagcatttttgttgagacagttcttcatttagcaaccccagtcaccatttacccaattgtagtaggactcccccaactcacacacttaataaactgacaaccaaaagcacctccagatatttccaaatgccttcttgaggggtaattttgccaattgaggatcaatgctataggcaatctcatgtataaacacagattttttaaaatggcagataaaatactagtcattcaaatcctgcagtagatttaaaaagatacattatgccccaataggctaatcctaggactgcagggaaggtttaacatttaaagatgtgtcaacgtggaacagggtactaactccttacttggaaaactggcaattaaagggaaagagttaagaatttaccgtgtctttcccatagaaactgtattttaggcttaccaaataaccctagtagatgagggatagttcttcttacagaggaattctagctgatgaatgctcaaagaatgaaagaattagaaaatcattactttgaaatcaataatgaaataattgattcgaataacaattatgaaataaatagtaaagcaatgcaaaaggtgaaaggataatggagaactttacaatgaagggatcagactatcaccacctcaatccacttttagtattactaaaagtgagacaactgcaaattacataaaaggaagtacatagtaacaaccatgagatattcttgccaaataataattttaaaaacctaatctaaccaagtcttttttttttctttttttgagacaaggtctcactctgttgaccagctggactgcagtagcatgatcactgcccactgcagccttgacctccccaggctcacataattctcctacctcagcctcccaagtagctgggactataggtgcgggccaccacagcagctcatttttgcattttttttaagacgagttttcatcatattgtcccggctcatcttgaactcctgggctcaagtgatccgcccacctcccaaagtacctcccaaagtgctgagattacaggtatgagccacaccatccagtctaatcaagtctttagctttacattccagtttacaagaaacaacagggaatatagaaacaagtaaaataacacctcaaggaagtaatcagccgaatccagaatatgggacagtctagaggacaaatgccaagtttcttcaacaagccaatgtcatcacaataaaagagaggaggtactgtttggtttagcttttaaaatttttaaaagaggctgggtgcggtggctcaagcctgtaatcccaacactttgggaggccgaggtgggcggatcacaaggtcaagagatcgagaccatcctggctaacatggtgaaaccccgtctctactaaaaatacaaaaaatcagctgggcgtggtggcgggcgcctgtagtcccagctactcgggaggctgaggcaggagaatggcgtgaacccgggaggcagagcttgcagtgagccgagatcgcgccactgcactccagcctgggcaacagagtgagactctgtctcaaaaaaaataaataaataaaaaataaataaataaataaaaataaaatttttaaaagaaacttaatagatataacataatataataaggtgacctcaattggatcccaattccaacaaacctcaatggcaaaaacattttcagacaattagaaaaatcagattattcaccgggtattagtgtgataatggcattgtgactatatgagatgttccttttgctataattcttttgctacgcatactgaaatatttaggagtgaaattacatgatattcctgattagcctaaaatattccagcataaaagaggggaagatcatagttgaaacaagcatggaaaaatgttgatggctattgaagctgagttatgagtatgtacggggttttattgtacattctactgttatgtacattcggaaattttaataaaaaaattttaaagctatcaatgcaattttatgcattaataatgtaaacggaaaaaactatatgtcctacttacaggtgaaaaaacaatggataaagctttgctttttcatcccttcttggtttcttttttttatttttattttttttttgagacagggtctcactctgtcacccaggctggagtacagtggtgcagtcatagctcactgaagtctcgaccttcccaggctcaagcaatcttactatctcagccctcaccgagtagctgggactctgtataggcacatgccaccacaccttgctaatttattattattattattttgtagggatgaggttttgcaatgttgtgcaggctggtctcaaactcctggactcaagcgatctactctccttggcctcccaaattgctaggattacaagcgtgaccattcttgtttttaaaaagcctcagaaagatagaaattcaagagagtttatttgacttaataaagggtaactgccagacacccacagcaaacataatacttgatgaaattttagaagcattcccattaaatggaaggaaaaaataaagatatctgatattggtatgattcaaatttaaatccgaggtcctagccaatgcattaaaacacaaaaagtacacatggtatccaggctaaagacagagacaaaactatcagtatttgtaataatctgttttcctaccaagaaaatccaatagaatcaacaaaaaatcgattagaaagaaaagagaatttgttagtaaagttgctggcaaaagacaacatacaaaaatcaatagctttcttatactcctatggtaattataaaacgaaagaaaaagttctattgaaggtagcaacaaaaatgaagtatctagaaataaagcaaacaagatatgttcaaaatatttacagagaaaattatgaagcactactaaaggacttaaaaatttggataagtggaaagccatatcatgtttattcatataaagactcattcatgtaaagatgctaactctccctggttaaatctgtaaactcagtgaaataccaaataaaaatgctagtaagatcctacatgggtataataatctgcatttaaaattcgttgaaatagtaaatatgtaaaaataaccacaaaaatgaaaggaagctctttcaatgccagataacaaacatattataaaaatataaaaatgtaaatgcttgtgaattaataaaaaagagatgcaggagagattccgttccaagatggctgaataggaacagctccagtctgcagctcccagtgtaatcaacgcagaagacgggatttctgcatttccaactgaggtacctggttcatctcattggactggttggacagtgggtgcagcccacacagggccagccaaagcagggcagggcatcgctttgcccagaaagcacaaggggtggggggatttccctttcctagccaagggatgtcgtgaaagactatacctggaaaattgggacactcctgcccaaatactgtgctttaccaatgatcttagcaaatggcacatcaggagataatatcctgcacctggctcagcgagtcccatgcccacggagccttgctcactgctagcacagcagtctgagattgacccgtgaggcagcagcctggcagggggaggggagtccgccatagctgaggcttgagtaggtaaacaaagtggctggggaagctcaaactggatggagcccaccgcagctctgcaaggcctgctgcctctgtagaccccacctctggtggcagggcatagctgaacaaaaagcagaagaaacccctgcagacttaaacgtccctgtctgacagcctgctgcctctgtagacctcacctctggtggcagggcatagctgaacaaaaagcagcagaaactcctgcagacttaaacatccctgtctgacagctctgaagacagcagtggctctcccagcatgctgtttgagctctgagaatggacagactgcctcctcaagtgggcccctgagccccatgtagcctaacggggagacccctccaagtaggggccaactgacacctcatacaggcaggtgcccctctgggatgaagcttccagaggaaggatcaggcagcaatatttgctgttctgcagcctccgctggtgacacccaggaaaacagggcctggagtggacctccagaaaactccaacagacatgcagctgagggacctgactgttagaaggaaaactaacaaacagaaaggaatagcatcaacaacaacaaaaaggacatcataccaaaaccccatctgtaggtcaccatcatcaaagaccaaaggtagatagaaccacaaagatggggagaaaccagagcagaaaagctgaaaactctaaaaaccagagtgcctcttctcctccaaaggatcacagctcctcaccagcaatggaacaaagctggacagagaatgactttgacgagttgacagaagcaggcttcagaaggttggtaataacaaacttctctgagctaaaggaggatgttcgaacctatcgcaaggaagctaaaaaccttgaaaaaagattagacgaatggctaactagaataaccagtgcagagaagaccttaaatgacctgatggagctgaaaaccatggcacaagaactacgtgatgcatgcacaagcttcaatagccagttcgatcaagtggaagagagagtatcagtgattaaagatcaaattaatgaaataaagcaggaggagaagtttagagaaaaaagagtaaaaagaaacaaacaaagcctgcaagaaatatgggactctgtgaaaagaccaaatctacatttgattggtgtacctgaaagtgatggggagaatggaaccaagttggaaaacactctgcaggatattatgcaggagaacttccccaacctagcaaggcaggccaacactcaaattcaggaaatacaaagaacatcacaaagacactcctcgagaagagcaaccccaagacacataattgtcagattcaccaaggttgaaatgaaggaagaaatgttaagggcagccaaagagaaaggtcgggttacccacaaaaggaagcccatcaggctaacagcagatctctcagcagaaactctacaagccagaagagagtcggggccaatattcaacattcttaaagaaaagaatattcgacccagaatttcatatccaggcaaactaagcttcataaatgaaggagaaataaaatcctttacagacaagcaaatgctgagagattttgttaccaccaggcctgccttacgagagctcctgaaggaagcactaagcatggaaaggaacaaccggtaccagccactgcaaaaaacatgccaaattgtaaagaccatcgaggctaggaagaaacagcatcaactaacgggcaaaataaccagctaacatcataatgacaggatcaaatacacacataatattaaccttaaatataaatgggctgaatgccccaattaaaagacacagactggcaaactggataaagagtcaagacccatccgtgtgctgtattcaggagacccatctcacgtgcagagacacacataggctcaaaataaagggatggaggaagatctaccaagaaaaccgaaagcaaaaaaaaaaaaaaaaaaaagcaggagttgcaatcctagtctctgataaaatagactttaaaccaacaaagatcaaaagagacaaagaaggtcattacataatggtaaagagatcaattcaacaagaacagctaactatcccaaatatatatgcaccaaaacaggagcacccagattcataaagcaagtccttagagatgtacaaagagacttagactcccacacaataatagtgggagacttcaacaccccactgtcaatattagacagatcagtgagacagatgtttaacaaagatatacatgacttgagcttagctctgcaccaagcagacctaatagacatctacagaactctccaccccaaaccaagagaatatgcattcttctgagcaacatattgcacttattctaaaattgaccacatagttggaagtaaagcgctcctcagcaaatgtaaaagaacagaaatcacaacaaactgtctctcagaccacagtgcaatcaaattagagctcaggattaagaaactcactcaaaaccgctcaactacatggaaactgaacaacttgctcttgaatgactactgggtaaataatgacatgaaggcagaaataaacatgttctttgaaaccaatgagaacaaagacacaacgtaccagaatctctgggacacatttaaagcagtgtatagagggaaatttatagcactaaatgcccacaagagaaagcaggaaagatctaaaatcgacaccctaacatcatgattaaaagaactagagaagcaagagcaaacaaattcaaaagccagcagaaggcaagaaataactaagatcagagcagaactgaatgagatacagatacaaaaaaacccttcaaaaaaatcagtgaatccaggagctgattttttgaaaagatcaacaaaattgatagaccgctagcaagactaataaagaagaaaagagagaagaatcaaatggatgcaataaaaaatgataaaggggatatcaccactgatcctacagaaatacaaactaccatcagagaatactataaacacctctatgcaaataaactagaaaatctagaagaaatggataaattcctcgacacatacaccctcccaagacgaaatcaggatgaagttgaatctctgaatagaccaatagcaggctctgaaattgaggcaataactaatagcctaccaaccaaaacaaagtccaagaccagatggattcacagccaaattctaccagaggtacaaagaggagttggtaccattccttctgaaactattccaatcaatagaaaaagagggaatcctccctaactcattttatgaggccaacatcatcctgataccaaagcctggcagagacacaacaaaaaaagagaattttagaccactatccctagtgaacactgatgcaaaaatcctcaataaaatactggcaaaccaaatccagcagcacattaaaaagcttatccatcatgatcaagtgggcttcatccctgggatgcaagtctggttcaacatacgcaaatcaataaacataatccatcacatacacagaaccaatgacaaaaaccacatgattacgtcaacagatgcagaaaaggcctttgacaaaattcaacagcccttcatgctaaaaactctcaataaactaggtattgatggagcatatctcaaaatattgagagttatttatgacaaacccacagccaatatcatactgaatgggcaaaagctggaagcagcccctttgtgtccccgtttgcagatcacatgattgtatatttagaaaaccccatcgtctcagcccaaaatctccttaagctgataagcaacttcagcaaagtctcaggatacaaaatcaatgtgcaaaaatcacaagcattcctatacaccaataacagacaaacagccaaatcatgagtgaactcccattcacatttgctacaaagagaataaaatacctacaaatccaatttacaagggaagcgaaggacctcttcaaggagaactacaaaccactgctcaacgaaataaaagaggacacaaacaaatggaagaacattccatgcttacggataggaaggatcaatatcatgaaaatggccatactccccaaggtaatttatagattcaatgccacctccatcaaggtaccaataactttcttcacagaattggaaaaaactactttaaagttcatatggaaccaaaaaaagagcctgcattgccaagacaatcctaagcaaaaagaacaaagctggaggcatcatgctacctgacttcaaactatactacaaggctacagtaacaaaaatagcatggtactggtactaaaacagagagatagaacaatggaacagaatagagccctcagaaataataccacacatctacaaccatctgatctttgacaaacctgacaaaaacaagaaatggggaaaggattccctatttaaaataaatggtgttgggaaaactggctagccatatgtagaaagctgaaactggatcccttccttacaccttatacaaaaattaattcaagatgaattaaagacctaaatgttagacctaaaaccataaaacaccctagaagaaaacctaggcaataccattcaggacataggcatgggcaaggacttcatgactaaaacaccaaaagcaatggcaacaaaagccaaaattgacaaatgggatctaattaaactcaagagcttctacatagctaaataaactaccatcagggtgagcaggcaacctacagaatgggagtaaacttttgcaatctacccatctgacaaagggctaatatccagaatctacaaagaccttaaacaaatttacaagaaaaaaacaaaccccatcaaaaagtgggcaaaggatatgaacagacatttctcaaaagaagacatttatgcagccaacagacacatgaaaagatgctcatcatcactggtcatcagagaaatgcaaatcaaaaccacaatgatataccatctcacaccagttagaatggcgatcattaaaaagtcaggaaaaaacagatgctggagaggatgtggagaaataggaatgcttttacactgttggtgggagtgtaaactagttcaaccattgtggaagacagtgtgacgattcctcaaggatctagaactagaaataccatttgacccagcaatcacattactgggtatatacccaaaggattataaatcatgctgctataaagacacatgtacacatatgtttactgcggcactattcaccctagcaaagacttggaaccaacccaaacgtccatcaatgatagactgggttaagaaaatgtggcacatatacaccatggaataatatgcagccataaaaaaggatgagttcctgtcctttgtagggacatggatgaagctggaaaccatcattctcagcaaactatgacaaggacagaaaaccaaacaccacatgttctcactcataggtgggaactgaacagtgagaacacttgggcacagggcggggaacatcacacacaggggcctgtcatggggtggggggcagggggagggatagcattaggagaaatacctaatgtaaatgacgagttaatgggtgtagcaaaccaacatggcacatgtatacctatgtaacaaacctgcactttgtgcacatgtaccctagaacttaaagtataattaaaaaaaaaaaaagatgcaggagaaaagtcaaacagtgagtagggacagaggaggtagagaggaaatcaatgatgatcaaagggagtgttcaacttccctgtagtgctctaatctttcaaaagaaaaatgtattcaagtatcatgtgtgtaattaaatcaataaataagaaattaaaaggctatataacaatatgaatgaatcctgttatgtaaatatatataaatacttatttattcacacaaaatgcatggaaagaagattgtaaggacactcaccaaattgtggacagttggttgtttattgggggttttttgggggtttttttttggtgagatgtcagagagcaggcaggaaagggaagtttgaagatttactctctctaaacctgtgtattattttgatcttttaccacaacaatatgcttatatattattaatttaaaaataaagacttggaaaaagtcaaagacacatggttaagtgaaaaaagctagttgcaagataacacagtattaacctattacataaaaagaaaaccaacgcaccaaaaacataaatattttgcatgtgttttatataggtagataaaattgcaaatgaaaaaaagaacagttgtcacatttgaggtaaggcattaaactgggtagaggtgaaggaaaataatgaggtgattaagagcccagctccaacaataattagctatatgaccacatgcaagttacctctttatgccctcagtgtccctatctgtaaaatggaaaaaaataacagtacctatttcatggattgttgtactgatctctttaaagcatttagagtgatgttgggcacagtaaggcctgtataagcatttactctcattgttacacatttctatatttttacaatttttataagaatatattcatatattcctcacgtaattccttgtgtattcctagtgtaattttaaaaataaaatttgaagcataatattagagaaaaaaatttacagaatggcatattgcaattttgttaaacttttattttaggtttggggtacatgtgcagtgcaagtttgttatataggtaagctcgtgtcacaggcgttcggtttagattattttgttatccaggtactaagcatagtacctgatagttatttttcctgatcctctccctcttcctacccttctccttcaggtagtccccactgtctcttgctcccctctttctgcccattgggtctcattatttagttcccacttttaagtgtgaacacgcggtatttgtttttctgttcctgccttaatttgctaaggataatgacctccagctgcatcatgttcctacaaaggacatgatctcattcctttttttttggccgcatagcatcccatcatgtatatgtatcacattttctttatccagtctatcattgatggacatttaggctgattccatgtctttgctattgtgaacagtgcacactgcaaagtaatatataattagagacaacttaaattgtccatcaatagggcaatagttaaataagtcatcatacattaataacgtggaatactttgcaactcttaagaatgagttgggccaggcttggtggctcacacctataatcccagcactttgggagctggaggaggaaggattggttgagcccaggagtttgagattagcctgggcaaaatggtgacaccccatctctatttgtattagtaataaatttttttttttaaaaaaagaatgaattggatgtctatgtatggacactgaaatataaccattgtgtatttaacattctttaaagtggtgaaatggtatgtatcatttttatatattatatatgtatacatctattatatgtgtttacatattatacatgtgtattttatgtatacacatacacatacacacatactcccctatactaacatacacataaactggcctttcactatttaccctatatacttatgtgtttgatttttttctttgagacagggtctcactctgtcacccaggctggagtgcagtggcatgatcacagctcactgcagccttgacttccccaggctcaggtgatcctcccacctcagcttccagagtagctggaaccacaggcatgcgccaccatgcctggctaattttttatactttttgtaaagatggggtttgtccaggttgtccaggctggtctcaaactcctgggcttaagtgacccaccaactttggccttccaaagtgctaggattactggtgcaaaccacaatgcctggcctgattatttttaaaatatgatcatgtcatccaaatattaccaatgctcgtagtataaagccccaaatccttaagggagcctgccacccagcctcagctcatattactctcctatggctagagtattacttaatatgctctagtcataggagatatttttcagttcttcaaattactatacatgttctagcttcaggtctttgcacatgctgtttcctctacctggaacatgtcttccacctacccaccatccaccttcatctaccctaatttatctttcagtcctcacttcttcagggaagccccccctaactttccagacagggttaggttcctctgttataacacttacagaacccttatttttcattcatagctctttttttttttttttttttttgagggagtttcactcttgttggccaggctggagttcaatggcgtgatctcggctcactgcaacctccaccttttgggttcaagcgattctcctgcctcagcctcccaagtagctgggattacaggcacatgccaccatgcccaggcaatttttgtatttttagtagagacagagtttcaccatcttggccaggctggtctcaaactcctgaccttgtgatacatccgcctcaggctcccaaagttttgggattacatgcgtgggccaccgcgcctggcccattcatagctcttatcacagtttacagctttctatttataggtaggattattaatgtctgttattactcctgttagactgtaaactccatgacagcatgattcttgtctgtcttgttacgtcctgacatctagtaaaagttcagtaaatatttgtgaaataaatgactgctttccgttagttaggatagaccttggctttggcactggctccattttcctctccatttcaacccctgccatcatgtaagcaacatcaatgtctgtggatgactcatccaacatgctagcctcactgccctttgagctcctctacttcaacaacctctgaccgcatgccactttctatgtcattactagccgttagtttcctggaccacccactaggcatggagctgctccactttagaattcctgaactctactagcctaatctctggctacaacctcctattccagttacttcttggttctcagaatacccactcctcattctctttcttttttaaaaaatttttgatcaaggactcatttcacagccaaacatttttcattctcatcaagatctcccatcctttgatttctcccattctccagctcattatcacctcatggcttcaatccctacccagtgtaggtgccattgtgcatcacttcaacctcttttttgctggctacttcactgcccttgccatttttaatctaccatttattgagcaattactgtgagccacattacatacattatctctgcaatctctcacaaaacccttgaggtggtatcagcattgtcccctttcagagataaggaaacagattctaaaagaggtcaagtagacttccagggcactggcccttgctggggtgggctgggtggcagttaggtggcacagccttgggtgcctctgctgccaactgtgagcaaagtctcgccactggcagcctggcatggcactccaactgtagctgtgtcagtgtgttatgatgccctcccacatcaacctggctggaatctccgtagtaaagtgatatactcaaggctctccagcacagatgatggctacactgacctccagtttaagaaaagccctcctaagatcccttataaggccactgcacttgccactgtgctctttttcgattggtgcctttctcattatcataggctcaccttctggctacatcagcaaagcgggggcagactgggcagttccagtcctgatcattgacattctggtattcctgcccagattttaccacctgcacagagcctactatgcatccaaaggattacttctagggcttaccaggattacttctagaggttgcttctaaaatgacattccaaactttgatgactagcacccagttcagcccctaggagaagagttacattgagactgtgcccagcttcaggatattgagcaaaaaccaaagctaattaagggttaaggaattctgcagtttacagaagtttaacaaaacaatggccagattgtatgggtccatcccaaaaaatgttaactgagcttacaatttgctaattaaaacatgctctatttttcatctcctggccctggcaaaagctcttgacaagtttttccatatgaatatgtattacggaagaatagtaatgctaactgtctgagaaaatgggaggttattctctagtggaaagtgttgttcccaccaccctccttagagttgaacatttcttttaaataatcttcattgtccatttgttcttgtagcaaatggaataatgctgtatgtctaacttcttattactaagtaatttatttttaaaatatctcaatatctaatctcctacatttatgtctaccttcatgttctggcggaagaccttggtaaagtcaaatatcagtgtgggtccatctgtaacattttttacttgttttcttattgataacaaccaggaatttttttaaccacagaggaagtttttaaaatgtaaacgctttctctatttaccaatccttggccagttccaatccagttcaccagtaggttgggcagcatataatttgggtcgttgggtcttttgtagatcaatatgttctgtatatcatgtctttaagtaatggacttttggttgtttcctaatgaaaaatgtagataagtggttattatttagagtttataattctattgctagcaccttatattatgatgtcattctgctaaaaatcgaaagactcagcctggatctccagaggactagattgtcttaggttgaatctgtttcctagcttgcaaatgtgacttatattaaaaagaaattaaaatgttgaaatcccccaaaaagaagtgaagtaatttgtgaaagatcacacagctagaaagtggtggagcagggtgcagttgggatctgaaggagatatttctgactccaaggtctgtgctccaaaccagtaggctattttgcctctcagagggaaagataactgtgactgcaacatggagaacgaaagagggaagcaggcaaatgtgaaggcttgaagaccatggcagcaatccaagtgagagttgatggtggactaataattgtctacttgaacactgcaaataattccaaataaagtcccacttacttcaggcgtgtgactttacaggatgaacttggtgggctttggctgacagcacaactaggtatgcctacaagaaaccaaaagaaaacagtagtttaagacattctttcaaaataaaacttttagctttaacttttctgcaaatgtatatatagatatacgtgtataatatatatatatatatatatatatatacacacatattatttattcctaggtatgcagccatttattaaaggcttcccatgttctgggaatttatttagtcttatttaaacttccaactaccctgtgaactaccattttataaatgaggaaagtgaggctgggtgcagtgcctcacgcctataatcccagcactttgggaggctgaagcagggctatcgcttaaggtcaggagctccaaacccgcctagacaacatggcgccatcccatctctacaacaaatacaaaaattagccaggcgtggtggtgcgcgcctgtaatcccagctacttgggaggctgaaacaggagaatcacttgaacctgggaggcgtaggctgcagtgagccgagattgtgccactgcactccagtctgggtgacagagcgagtctcagtctcagtaaataaataaacaaataaataaagtgatgcacaagaagataaagaaaattgcttaatgtcacacagttagttaatcgtaaagatgggatcagaacccaagtctgctgctctccttctagtcacttacccaacgaagtcccaaccttagttagactcatactccctgacatcacccacaggctgtcagggccggggcgcggggcgggggacggagggcggagggcggggacgggaatcacgcaagaaagcaacacaaatctccactttccaactttatcaaggaactaacccgcaaaacctgtggctagtgatccgcttgggaggggccgagctttatcctgaaggccacgaggcacccttcctcagtcttactctgggcagtgatcccattttacactccccactctgctggcaccacgtccaacaggagcagcaaacctagcctcaaagccacaccaacccaaggacagctgctgttccattttttctctcatagaatcaaaagacacaatggcggatatcaacgtaatttatttggatcttctccccttttcaaaccataatctagggtctacagatgaccatcagtgggttcacgaaccctctgtgcttacatgcaaaccatgggcatttttttaaaggaggtggtcaattggtcaatagttttccttattttcaaacggtgccatgtgcatcctactgcccacctcaagaaaaacaaaaagaggctaagaatcctaactttaagctctgccagcaagagcttctcggccatctttactctcagttgcgcatgcacctggctcccgccttccttcccgctctcccctctccaccacccatgcaaccaccatgcacgcactcccaacacacgcacccccccatgcacgcacccccacgtacggacccccacgcacgcacgcactccacgcgcacgcatatatattaataaatctatatcccctcacacacacctccacgtgcacacgcacacacatcccccacgggcttctcggtgagtcttcacgctcgaaagcatctccatgtcaccactcgcacactgccacgtccgcacctgtgtaaatcacatcttcgcatgtcccccacacatcacacgcacacaagcgttcccgcacacgcgcgcctccccacgtacgcacctctctataccccttcatacacactcatgccttctcaacacacgtaccagcccacttgcacgcacttgcaagcgcttgcaccctccacacgcaccgctcggagcttttccccctctctcctcccaatggctggcttctggagccgacccttccacgcgcccccagcttcgcggcagctaggtccctccccagcgcgctgagctcacagcgcaggagccggtcgcagccacacaggccggtccgacgggaccactgcttccctcctcacatcccaggagacaccaggtggggcgtggcacctcccacacacggctggagggactcccaggatttcccgtccttccgaattcgtggggggtcagaggactgcggggaggcgtttctcatcctcgctggggaaaggactcacctggttcccaaagccagtttgctcttcctctacttcctgccagagggtaagggattccaagagaaagacaaggtctttagggcggagaaggggaaatgactcagagaggaggcggcccagagggaggggctgggctggaaagggagggtagtggggtgccggagggaaaggggagaaaaaagaggatgggagaatcgcctcgggggcagttttgggggtgtctagcaaagacctggaaggccttcccggttaaccctgacttcaggagctgctgcactgggtcatttgtttcctcagtgctgggccttaaactttacctcgtacccaaagcagccatggctaagacccttgctagcagctcaccaggcatgtaggaatctgcaggcctgggcatgggcgcatggaatgattaactcttcatgttcgagggagccaataatagtctttacctcataggattcctgggaggattgaatgaatcactgcatctcgagtgcttggcatagtgccaggcacactgtaagcaaccaataaatgatagcgcctataattcaaaaagtcttcattcgttgatactctgtcttctctctagattatgagtctcatgagggcagggattatgtgtcttattcatcactgagctccagcacctgccacaaacagactatcagtaaaatatttgttgaatgagtgaataaatgaatggcggaataataacttggagtggtggctgtaccaggactctctcctttgccttttaagggatgtatctgtgggagtttggattgggaagatcataattggagaaggtggcacacaggacccctgttagttgctgtatcaagtgacctactctgcccttggaaagtagaatatctttggcaattccctgcatgtacacattgaagactctcagatgactgacctgaaatttgaaacagagacgccactagctaaaacagtatttgcattttgtacagttatcaagcaggatgggggagagggctgaagcagaaagctcaaaagtaatggtagcagcggattggcaagggaggtccaagtgaagtgaagtgtgtatggggaaggatagtcaccccaaaagggattctgatgatggtcctaaagtaacagtaatgtcatccacttctctgtcccagtcgtaggatttctgatgatctgccctgatgtcccaacattcttggggtaggtatgcacatcaagctcctatcactaccttcactaaatttgcatttatggtaattcatactgttagggctagaagggaccttagaaattacccatactctttaattcctagttgaaaaactaagtgccagagatggcgaaggacccaggccttggaattctctggccttggtactgaatctttcagagactgaatttattttatatcctaattatgcatttaatctctgccccatccccacccccaactcccaaaatactgagaagaatgaaaggacatgaatggaaggtcagcagaagggaagaagagaagaggtacttcaaaagaccctgactttacttccttttgctttgccctgaggaatttacctggaccttcagctagtctctgcatgagaatggctctaccctggcaccctagtcacctggcaatatctacaatggtccctcgagcaaagacttgaaccacagctaatctgagtcttggtagaatgcctgtgatccttccagagcacaaaggatgggaggcctgagaggagctgcttcaagatcatctcccacttgcctccttatgtcccttggcaagtttcatgagacagattttcatagcctcccacctcccaggttctgatgaggtacaagacttcctgaaccacttccctcagaatagagctacagactataaagccacttaagtgcagtctataattggcttcttagcagtgaggtatcccacaactcacttggaagtcttctggtcctttttgtttcagtgtcatcctttttgttgtttgggacaaggaccatttggggctggaatctttgactgctttttctttcactgtgtaaataataaactgtttgaatttaaaagtgattccttgtatctttacctactaaatcagtcaggccttggacttggacttggacttggacttgccatatgtgcttgacagctgcttactgtgaatttcacatttttggctatctcatgaccctctcttaccactgagggagttaagtcgaacaaagagctgttgaccatagtagctttttcttatcactatacatcaaagggaaaatcagcccaaattccattttctgggacttttaatctgcctggaagagcaacagatcctcttcgtattctgtgtgcaaggccagcccttgtgctctagaaggatcacaggcattgtgctaagtgagactcagttctcatctatatcccctttgaaagagtcctcttggtccaaaatatttcccctggcaggggcttagcctgccagggcattgtcagctgacccttctaaactggaaagtctgatgcttgccctccccaacttgtcagtcccaagtcagacacaaaaacattttccctagaaggttcttgttaacatttcttgttttctgagaaacaatgtcttgttttctgtgtgaattttgcccacattcctccattagcacattattggtggctaatttattaattcttttaattgttccctttgaaggagcctggccttaaagaacaatggaaagaagcagtcataggaatcctggaccaggaatatgtgcctgagagggattatacacctggtgctggtgagttcacccaacttcacaatgtatgaggtggactacttgtcattctgcttatcagattctaattctattcaaccagcatttactaagcacctactatgtacaagtctccatgctagatcttggtaagagcttccacttgcactccagtgtctctataaatgctccctttgtcagctaccactattaactcattgagttcatagatgtaaaactatctgagaagcagtattgaattgggtactccattataaatgttaggaatatttttcatcttaatatcccaccacagaaatgagaagagtactaggaacataactagtggttaagaactgctcttgaatgacccgacgagatcagtcgcaattgtaatttgtgtattgtgcccaacagtataggaaaaccaccttgatcctccattcctggaaattcatggtggaggagagtcattctcattagctgtcatgctatatacatttctaataagcttgtaacaacctatttggtctctgttactcctaaccatcataactgagaccacctccctcccaaatacaggctcagattcactgaaactctgggaccaattctattctcagatggggaaacataaagaatcccatatctgccctgtcctcgcacattaaatggagatggcctttccaaacatcatcacacacacacacacaaaatattaaaattttagctatgggtaatagcctcatatttggtatttgcctaggttgttcttcaattaaaccactaaacacacaatgttccaaattcttttctcctttgaattttactccttttacctttgggctgtagttcttataggcccctggtctgatgacctgtttcaagtcacttctctagctgccgcccttgactgccctgcttcattcacttcatatcgcatgatcccttttagtcttagtgccactacaaatctgattaagatatgcccaattctagccctgagggacctcctggcttcctcccagtctcctcctgcaggccagctgttttaacagtaagtcagctcacttgcttctggtgctaccctaatcttaatcaatgggttccagcactgggattttatttgttctttaattctcaacttctgctccaatctctaaaactgaatgtgtcatgtttccttgaaccctatatcttcatttctttggtcttcttgaccatatcatgctcctgaaatcaaagtcttcttgattggattttgagctccagaccccctgggtcctttctgtccagatcactacctattatatgatccttggtttcccctagtcacttacccaattccaggagaatccacggccatcttccttttagtcctcccccaattcaactccagcgagagacaacaaagaattcatgaatacatatatatttatttaattcataatatagcattttggatgggctggaatattgtagagagggatgaggctgtgtaatccacagatgctcatatttctgtcactaggagagacactattggtccagagctcccaatacaaacaggcgtggggtaaagcatttgataaaaaatagtccaacaatagtctaataaatagtctagccaataacaacaatacagcatatgtctgaagctggcagactacaccataaaaggcagttttgtctgacctgatggcaatcagtttggccaacctgtaacacacagccaaatacagccattggctccaaggctgcagttggcttcaggagctagaaataagtgtaggagtggttcttacctacctgcctgacactctccattccttggaggaagcagtatcaaatatttgagtttattcaaaagtccatccgtggattgctccatcttggtagtcatatataaatatgtaaaccatggaagtttagaaaattcacctagagtgttttagccgaaaagaacagataagtgattttgctgcaatctgaatttcactgcatctaaagatacacatagaattgtataataaaaacacatccagatgcagttactcttacttacaagtagccagaacctcaatgtggcattaaaatttctttcatactctcaaaacaggttttactttatttttgattatttttgtgctttcttcaataagacaatataaaaagtggaaacaagcataaattgcagacataaaataatcttctggtagaaacagttgtggagaacaggttgagtagagcaacaacaacaaaagcttatgcagtcaccttctttgaaaatgttaaatacaagtcctattctctttgtccagctgggtttagctagaggtagccaattacttctcttaaggtccatggcattgccaggattctataaaagccaagttaactgaagtaaatatctggggcccatcgcacccccactaagtactttgtcaccatgttgtatcttagaagtcatttttcactgtttgactcagaatttgggacttcagagtcaaacttcattgcttactccaaacccagtttaattccccacttttttaagtaggcttagctttgagtgatttttggctataaccgaaatgtaaatccaccttcaaacaacaaagtttgacaagactgaaatgttactgaaaacaatggtgccatatgctccaaagacatttccccaagataactgccaaagagtttttgaggaggacaatgatcatttattatgtaggagccttgatatctctgcaaaatagaattaatacagctcaaatggagtagtaaccaagcttttctgcccaggaagtaacaaacatcactacgaacatgagagtacaagaggaaactttcataatgcattttttcattcatacattcattcaataaacattagccaagctaatgttccaagcactgtgccaggtattaacaatataacaacaataaaagacacagtccttcctctcaaggtgttcagtctagtagggaagatgattattcattaaaatttttggtgcatcagaatcatgaggagcttgtcaaaaatgtaaattcctgcctatgttctcagatattctggttaggtcaggagtgggaacccaaaatcaattcttttaacaaacactaaaggtgattctaacacaggcggtgtgaggaccacactttgaaaaacactgctatacaatgtgattattgctgagagagggggatgcttggggtgtctttggatctctaaagagggatgcatcatcaagtctaaggaataaagagttagtctggttgagagagatagaggtgaggaaaggtagtccaggatagagtcaaaagtagggtggggaaattagatctttgtcccagggcactaaaatctaaaagacaccacaataaatgaacagttttggagagccaaggacaaggcaaaggaaattgttctactggaatggaggttgcattttctgtacttacagcattttcacactattcctttaatttaagaaaaatttctgttgtttactctgggcattaaaattgttaatcatgtttctgctgcaggcccagagaataacttgtgtgaatagttgtgtaaatagttaaacttggctaccttaatcaatgtgagggggaaagtggcaaaagattaagctgtgtaagcaaacagggacatgaaaacccagactctgtaaggagttgggaccttctactgggtgctaagggagccagtgaaaagtttgatgaaggggaaaaaaatcatttttttttgtttaagaatttggggatatgccctagggaagagacaaaggtgactgagaaatgaaggagaaatgaaggacatacattttaaagcactgttacgctgtattggagctgggagtaaggaaagagattaatatttatggcacacttaggaaatgtcaagcgctgagctaagacagtttacatatgctatcttttttaacctttgaaacagccttgtgaagtagacattattttacagaggaggaaacaggctcagagaagtgaggtacttgtcctaggtcacaacgctaataaatggtacagaaactaggatcatttgaatccaaaggttatgagctttccactacagcaaactatttaccagcactgatgaattttactgaggttgttcatttcctgattagcagtaagcacatatggtatttaaaatcaaaaaagatgacattgctgctagatttatatttttgagccttccttgtgtgtctgcatcagtcttgccttccacattaagtgaacaaacaatacataactgttattggggaggattatatactttgtttcttccacagaatagtaagccatttggcagcaggtagagcattttgttaatatgtgcactcccatggcagtagtttggtacctggcatctaatagtttattgaatgaattaataaatgagcatccaccaaactaggggaaaggaagaggggagttttgacatttcaagtctccaatctgagggagttgttatggctaccactttgtaattttacaacagtaatattttcacaaatcccagaagacttccgaagccaacttagctcctggaaaggggaaagctctggctctctgacatccccaatcccttcgatggaaatttaaaaaaaaaaatcatagactacaaggctccattcccttcaactatactggttaggactgggatgaagtttgtctccatttgcgtggagggattggctaagagaatgaatactgtaaacaagattgcaaaaggaatgattatttatcctatttaagaaaacaaactgttttcagacattcttgagcacttcagaagtgttttatctgaaaaagcaagtacatttatatgggaatagttggtgcatcaataatactcaatttttactgattaagtaaagtaggttcctaaagagccttcactgtgcaactttttaaaagcctaattctcataactgtgtgtacttgggagtagtaaaactttttttttaatagtctatgacagaatttttaacaattcagatggccatcctcaagtaggtagcatcacttctacctgatcaattttctatccagcaacagcatctcttgtgcaatcttgtctgtaaatctctgctaatccaataaagctcttcccattatctgtgtcatggttgcatgtgtatgtgtgcgtgacaggagggaggaaggcaatgatggatagagggaggaaataaatgttgattgattttgatgtttcctttaggggacaaaaatggatggtgtaacttattttcccttccagtatatttctcactcaaattagcaaattaaaaagttttttgttctagttcgaggtggtgtttggaaaaaaaagttttttgtgtatatgtaatatataaagtgaatatgcataaacatacatacacaagtgaatatatataaagtacatatatgttcactttatatattacatatacacattcatggtttcctaacaaacccttgatgataggttttcatcaaaagtaaaatataatatgtgataatttgacactgttcaaaattctacatggccaaactggccagtactagaaaggctgaccaccccccgctctggcttgctagctccttattcagggcacctttccacattatttaactagaattaccctaattgcttccaatataatttatattcttaaatcattgggaatttttaattctccaatgacaacagaggcattttctaaatttttctccaatggcttgaacgcagactactcagataatttgttctgaaaaactcaataaattaattcaaatacaagctttaatgcacaaaaattaaatctgcaatatctagttattttggatgcttcaaacaaactttattttgtgtctcgtatattgaacgctaacttaggtgtaggaggggaagaactgctgaactagagagccagtgaattatatactctcctgaaacttaatgacaggttttcatcccagaaacataaggggattcttgaggcctgcagttgcattcctgccgctcagggtaatcaataaaatctggggcaggcaagccagacaggatcattagggatttgttccagattgtaaatgttggacaaactggaagaatgaaggtcacatcaaaagtatgaagatggagagagttagctgggtcatagaaagacagcatattgttgtcataatccaggaggacacccagacgcttcaggtgtgggggcacatccaccagcatttccttgttgttgtgtctcaccacgaagttactattgcagcgagagaagacccatgaggaggcattcttgccaatccattcattctttggagctgatttgtaggcaatgccaattgcatacctgtgagacagtggaaaggagagagaaataaacatttatgaattatctgagttgtgtaagacaccatatatgatatataacaaataggatatatgtttattccttaaatagtttacacttagatgcataatgctgatatcactagagctttaaaaagttagcaattagagcaatgtggcagtttccatctcctagcccagtatattttccattattttattaaaaagctggcaaatttttctaggagtggttttcatcacataccttttaaccttgacttattggtattatggttgtgctatagaattgaatctcctaggaacctaatgacagaggacagaaaagaaaaggaaaatgggatccactcaccatgttgaggaacccatgaccacctcccaatagtggcagccactgtcaatgaatatatttcctgctgccccatagcaccctgtgccactaaacctctctggggtgtggctcttctttagagagctttcatccttctccatctgcaatccatcattggagatcttcaacttcttgtgagtcattttgggatccaatttaaagggttggcctgaaaaataagtagaaaaaaaaaaaagaaaaagcactatgaagtatcttaaaattctaccttttccaccagcatcatcactggcagggtatgctcgataacatgatcactcttggtccagtgcaagttggctgctgtttaaattttattaagaaaacaggccagaaaccagagttttcaataaaataagaataaaggccaatctcccataaaacgaccttcataacggcgtttattttcccactgtgggaaaaaatgtggatctctcctaaaagcaatttgagggaagtcatattccaagcaaagaggagctaataagctgtcccccacatcatatattatcaaagtaaaagggagtgctcaaagtttcatgttctcaaatatgttttgtactttgcttaatttcagtgggttgtttgggatttgggtagattttaacagaaagagtgttatgatgtctgaggtgaggggaattgatgtaattgctgcttgatggcagaaccggaaaaccctgagaactcagcaactgaacaattatttttgccctcttacaattgggatgtaaataacatataattaggcaattttgttagagtgactgttgcatcatcaatgatcagagaaaacatttattgtgtaggatcattcacaacagataattctttataaccatatgacaaaggcattgttactgagggaccagttgctgggtgtggcaagagatttttatacagaatgcttctgtgacagacactgttggctaacacattaccctttcccaactttttctctcttactcactttcactatagaggccggaaaagctaaatactcaatcttccagcctcccttactgctaggggcggctaagaacatggaagcagatggaagcagaagtcagacagagcaggggaaagttctaggaaagttttggatttccagataaaagggataaccattatgtgtaccaactctttcctctttcctatcttgagaggtaatatgacatctgaaagttgcagtggccatcttgcagccatgtggcaagaagccaatgcacacagggagaaggagcctgcatcttttatgacatcgcagagcagctgcattagccctgaactgcctaccttcaaacttcttcctatgtgtatgtgtgagagataaaatatatactattcatttaaacaattaacaaacgctatttgttaagctatgttagttgcactttttgttatttgctgtcaaaagcattcctaacagatatggcttctctgtagtaagattttactagattatcacaaataatgctcttttatgcaattgtcccccaaatataaggggtggagtacagagaaaactcttcactaacatcctcccaagctaacagtctttttgtgcatatctctgagtccacaaatctcccatgggcaccaacaaactccttgcccaaagtacaaactacaacagtatagctcctctacccagtaccactgctccccatgcactgctgtgagtgcctgctcaggctgtgtactcccctggcatggagaagaaaattgatctttccttttgaaatcaccacaacgtactgtttgtttttagtcgggtaggttcactgttccggctgccggcttggtttatggctttaacgatgaagatgtagcgagtcccgctctggagtccatgcactgtgtaatggttctgtttaatgttgggaacaatcatccagctgtctactgaattatacaggcctgtaacatggggaaagacaaggacattaaccagcaggtaagagagacagaatgaaaaacacactgaaaattcatcataagccaccccctcaaaagtgaattcattttgttttcttttgagtcttagaagatgtaatgagatgaaccagggcttatgattccactatttcattactcccatagaactaggcttaggccaggctccttgcttgtggcaattgaatggaactactagcataagttaggttatttcaatttctttcccagataacacaggaatggctactatacagagtcacggaatcatcactcttatggagtctctggatatttactccaaacgtccactcctctgagagctgagtttggtcttgtatggatggagcaatcctgtgcagagcagggaaacatggaaactcagccaaagggacacatagatactgtatttcccttattttacaaatgggaaactaggattgagagaagaaaagtgacctgcccaaggccacagatagtcagtgatggtgctgagaatagaaccctggtatttttaaaatggtagcccagtgttctctctactacatcacagttcatggggtgaacaacaatgttcttttgtctctgcaaggtagtgaggctctcagggcttacaattccactctcctactccatccttacccttacttcccaaactagccggtctccacagtaccgtagggaagccaaagagatgacatgataaccaaagcaagatatcatctccccactattacacaacacattctgttgtgtgattcccatgttcattttgggttgagtggtccaggagcacattgttatctggaatcttcctcccttccaagtagggaaagggatcagagaactaggcttctgcttttgatatattttagactgcaaatattaacttaaacaggggaaatgtaaataattaaaacatgtatttggcaagctttcggtaaaagaaaaaccaacattctagtctgcagattatttagacttctttctactgttatctgcttttcagttagtttaccactttttagccacagttctactagagggtagaaagggaaaggcgaggaatataagcagtgaattcagtcatttctatgcaactctagtacaaaatttagtgaggttgaaaattgaaaataataagtcatgaatgttttgcaagagatctgatcaaagggcttataattaatctgagaggaagttgaagagcctaagttaaaactagtaaaagaaacgatggagggcaaacagatatgcaggagaaagaggaggaagaattggtggaggtgcccagtgattctaatgaaaagacaatatggattaaaagggtaggagcaatgtttgaggccttgcctatgttaccaatacacagtatgaatcacaagctgcacataagattttaatacaaagaggaaaacatataatctccagatacacacccaacaatacaaagacaaacttcacaatgaagtactatgcagctgtgaaaaaaatgaggaaaagatcactatgaactgatatagagtgatttcaaggaaatattgtcaattgaaaaaagcaaattccaaaagtatatatgtatatgtagtatatatgcagtacactacttttttgagagaaagaaaaataagaaaacatccatatatttgcttggatttacaaagcaacaacaataaaaacaggaaagataaataaaaaattcatgaagttggttatccacaaggggtagggggtggaggaacaggattaaaaggatgtgggaggaaatgacatttctctgaatgtacctttttgtatagcatcctctttgggaaacacattgttttacaaattcaaaaaaataaaattaaatgaatacagatgggaaaattggggactaaagctgaaggcaaactgaaacaaacccaactgcatttcagacgaacagcataattacatcaatgtagtgggggtgggaggaaaacctcaaacaaatcctgaagtattgttagccagtttgtttttgttgtggcgtggacagagcaattcagaaactattttagatgtattatgggattgagcaaatgagtacatgtgttgatgttgggagccagggttcatactgtggaagaaggaacatacaaatacagaatggagaaaggcaggaaggaacctgtggggatggactggaatttaaggtattggtgtaaactcatgatttctaaaatatatatatgtttgtgtatgtgcacataaatatgcacatatataaagtatgtatgcatgtgttattatatatgtgtgcatatgcttacatgtatggatatttgtgtttatatctagcatatctagcactcaggtcttggtctctaatattgtcccactaaaagaaaccagggtttcttggaaaataatgactgatttcaaggctgggacagaataaggtcaaaatgagcctagaacattttgttatgccagaaagtaaggaagtgctcaagaaaatgatgggggaatattataaggacccagaaatcaccttgaaaggctcccaatggctaaatcttgacaatttgaacaccaacacaagtaagggctgtaaataattattaacaattgaaaaaagataattcatcagcccatactgatatataaacaaatgggaggaaatggggagtggaactcttgcttatagtagaatgccaagtgccaacttgaaaatgtgggagggaatactcaactggaaaaatcatcattttgcaatcatcatattaatgattgattcaggcaagtatcatcaactgataataaaacaagggtgggggtagggatgagatggtttgatgaagcagcagggtatttttatggttttaaaacataccacacagattccttattagtggcaaaagaaaaagtagcaactacagtgaataaatcagacgacatcttgactaggtgatcaaaattagcatcatcagtgaagggcaagtggacatcatgtgtctccagatattataccctaagaaagaactgtactgctaaatataatcatgagaaaacttcagaaaaaatcaaaataaggaacagtataatgaagtataataaagacataaaagaacactttttaaaaaatgtcaatgttgttcaagacaaagaaaggctgaagaaatgttccagattaaaagagatatggcaaaagagatacgacaattaaatgtaatacctgaccctaaactataaaggacaatattgggttctttatatgtcataaagaatattatttggtcaaatgtcaaaaattgaaatataaatggtggttagataaaagtattgcatcaacgttaaatttcttcaagttggtaactatactgtggttatgtaagagaatttccttattcttaggaaatatacactgaagaattcagaggtgaaagaccatgatgtatgcaatttgctctaaaatggttccaaaagaacagggaatgttagcaaatgctaaaggaaatgggacaaatattaacagtaggtgaatttgggtaaagaatatatgggtgttctttgtgctagtcttggaaagttttctgtgattttgaaatcatttctaaatttaaaaaggtaaatatatgatcctctaggtattactgagatttagtaagatgggacttatgattgaattatgtcagtggaagtatacctcttgttcaaaagggaaaaattacaatatggaaatccctgaacctgagtgtaaatgtgtggtagagagtatttgcatgagaatgaaaaggaagggaaatagaagttatgtctttctggtagtatgttatggtccgcctggctaggcagagtttacggctaatgcttttgtaatgcaaaacacaaaattcaaacggaggaaagataataaagtaatcagaagacaaacacactcaaatatctgttggaattctcattcacctcacagcataatctgaaacatcattggttgtgatcatttcaaatcttagaagaggtgggaagaaagttaaaaatcaggaaataaagttgaaagaaaaggtgaagggggaataatcctcaccaacaagcatgaaatttctggataaagaaaatgtgaaaaaacgtcaaaggaaagtagctctcagaacggaggttcagtcaactgtggcaggccagaccggcaggtaggattgggatcctgaatcttcaaaaatacttattcctagtaaaatagtttctcattgccatccaaaattttgcttcaggcctctgcccttgtccttgttctaacaaaattttctatcaataactagaggaagaaatagaaggcaggctgtgagggtaagcaagtatatttgaaggtagaatctgtatcccaaaggattttagcatgctgaaatgaagtggcagaactaaccagataaaatgtactagggataaattcaaggctttgtatttttgttttagacattcaattgtataagaacaggatttggaatacatagaaaattcagttgatcatatgctcagtaaacagtcagtagtcaaagtggctgctgaaaaaaaaggtacagggcaattgggaatcagctaatgtacaagagaaataatccagctatcctctgcagtgctcagaccactttgggagtactacattcacttcattgacagaacattttataaagcacagtgataatcaggagtgtgttcttaaaaatgatactaggataacaaaagatctgaaactatgccatatgaagagcaattgaaagaaaggaagatgcctagcctggaaaagagaaaatttagaaggacataggaactaactaaaattatctgaagaactgttatgtgaaagatggattaggtttgttagtgaggcacaaaagttcagaactaggactaattggttgctgtggtttactttaaggagcattaaacttgaagtctgacaggctcaagctgcaaccttgactccctcatttcgtagctctgtgactttgggcaactcactcaacctgagccccagtttcttcatctataaagtagagttaataacattttataaggctaagtaagcacccataaggactaaatgagataatgtatgtgggagcatttgtaaatggcaaagcataatacacatgtaaattattattgttgttattatttactaaaaggaagagttaagccccttataaggaagcactggccattatttatagctgcacaacaatcaaatgggttgttttgttagaagtgaggtacctatcactggaaatgttcaagcagagacaggatgattatctactgggtgtctggtagaagggaagaagattagactagatgacttctaagctccattccaattctaagatgctatgatcctatcactgttaagaattatcctttaagcttttctttacaaaggactatataaccttgaaaacagaggtgacaacctttagatctttgtcacttctcagacttcttcttaattcctgggagatgactgctttccccatatcaggaaaaagaagcacagttgttggcgctaagactttccagagtaggagagacaaataaatcagtgaagcattagagtttgtgacttcacaatctgaagaaacacccaggaacatagttacatgggccaagtggtttaggttggagctgcacgaagcaaatgttttttagagtttgatccccaaatgtcctctcatctccccaccccaccttgttacaaaacagaattctgccccagatttgtcacaaaacaggaaaaggaagcctatttgaaggggttagttggaaaaactactctcatgctggcctgtgaagtcagacacaaaagcaggaacaaaaaagtaaaagaaaatactaatttgcagctatggagatgttattttaggttgggaatctgttccagtcttgaatccagctttaattttgcttttgtttccatttccaccatccctcaccccagccctcactgcacccagggcattgaggggaactttcagctcatcccctcttgactggcatgagtgaagttcctactctgttttgtcttgctccaattcaccagaaagtgaaaccgtaacatgtgagctaaacaacagctttgttaacctttttcattttgtggcccactgacatgttttcatatttagcataattcttggtggaaaggaagaagtaaagggaagagtgacagaggcaggaggcttgtcaccatattcactgatagaggtaggtttggtaaaggaaaagtctttgaacataatgtattttaccacgataatgaagtagaagaagagtcaaggagagagatgttcatacacacagaaccagcaatgatggtggcaaggaacaagtaccaagctgtactctccttgggaaagtggagtgacatggattaattgaggaaaggctaagggttacataaatgaatgggaatggccccagcaactgcccagcaaggaaatatacaacttgcttgttacccatcagtaaggtctttgcaatgccctggggagcttacactgtctatgaaacactatactaaacaacctaacatgtcttacaaacacttgcctcgtggcgccccggccaatcttgagcagcttactgcttccttacatttccttatctctggccacaggccccaactacaccatgacttactgatgaagttagcctggccagtgaatatggtgtactgaagctcataggagctgatgctgaactcatcatccgagatccagtggactgtaatggtgtcatgggaggcagtacagagttcttctcggatagatggtgggtttggggctgtaaggaaaggtggaaaagaaagtaaggaaagcatactttctcttctggaattttacaattgttactcttcctgcgtaacccaacatctcttgaagagattttcttaatagagaatctttagattgcatgaaccatgcaacctgaagcaaaatgctgggatctcaagctccctaaaaccacttttgctacatcaataaaaatattttagcaaagatataagcctaaatttttgtgatgactgccccagctgtctagtctgcctgcataaacacttatgtagacattaaagtgattatatggttttcttaacatacggtcttcaacttatttttttaaatttcaaaatgagtatatatatatatagacagatttttgctcttgttgcccaggctggactgcagtggcgcaatctcggctcactgcaacctctgccttctgggttcaagtgattctcctgcatcagcctcctgagaagctgggattacaggcacccaccaccacatctggctaatttttgtatttttagtagagacagggtttcgccatgttggccaggctggtctcgaactcctgacttcaggtgatccacccacctcggcctcccaaggtgctgggattatgggcgtgagccactgtgcccagccccattatatatttttagctgtatagtcaagtgcaaaataatgagttccctcatctataaaataggggtgataattaacttatagatttgttgtaaggtttaaagatacaaaattaatatacagtgtctagaataaagtagatgttcaataaggagcagctatttaatatagtaacaaaacagttcaaaaattgtttgtgtatatttttttcatgaaatgatcattaaataatcctgaaagtagccagcatttttaacaggctggttgcatccctcattttctaaaattgtctgagagccagatatttcttacatttttcttcctgatctactaactcctaattttccttaaaaccattttggttgtacttacacccacataaggcattctctaatattccctaattgtcacctgagttctactctcataactagcaacaatacattactgttagattcataaggacaaatctatcagcaatttcttgtgttttactcttaagtacagatggtatacccattttgaccctagaaatagttaacaaatcataaatcatctttttttctgttacatgaactaaaatatattctgtctgaaaagacacatgcatcattttaaagattataaaatatgtaaattataaatattgtctttttcaaattatttttaagtaaaagcataccagaagaaaaaaaattaaatggaaaggaaagcacagtattttcacacctgttaaataatctaacccctctagcagtttcttttctctggaaaaatctaaagcaaagttttcaaaggcatcattaaaattgatgtctggaatcagaacttgagaagatgcagttgccatagcgaccctgaaaaagagaaaagtacatcaatatacatcaaaataggttgcaactttcacccagtgtttgatttctggtttaacaaggagaaaataaatgacttgtaaggcttgatttatttagtgaaaatatcatatctctgcctttccaatggaaactatttaaattttaatcatcaggaaccaattaagagttataccatatttattcacatatgttcacccctcaaacacactcccccatccggtcttaattttgagaagtaaatacaggattttttcccctctgcatcattttccatctggcagacagcatcaaaactagacctttaaaggtttggtaaaaacagtttaagagagatttttcttttttgtttatgctagtcagcaagtcagcatgctaggttaacaccttccctaaatatatcctttatgtgatttttttttttttgagacagagtcttgctgtgtcacgcaggttgcagtgcagtggcgccatctcagttcactgcaatctctgcctctccgacccccttccaggttcaagcaattctcatgtctcagcctccctagctggtggcccgccaccacacccagctaatttttgtatttttagtagagacgggattttgccaagttggccaggctggtctcaaactcctgacctcaagtgatccacccgttttggcctcccaaagtgctggaattacatgagctagccaccgcacctgacctatgtgatcttttataatatttatatttcactttattatcctcagattgtatagtgctatgatagttttatcttcccaactaaatctaggagtctcaagagcagggttcatattttgtacctcttaatatcttccatggccctaacacagcatttgacacatagtgaaaaaataattgttgaatgaacaattgaatgactaacaacaaaataactgctaacatttattgggtgcttagtatatacaatgctctgtgcattcactttacatacactatctaatttactctttaccataacactatgtagtagatgttatttccattttgcgaatgagaaagttggcacattaaaatgctaagtaacttgtccaagatcacacaaccagtaagagtcagaaatataattgagcccatgtccatctgattctaaattctataaccttaaccatttagactgttcttttcttcaaaaaattgaggtatattttatatatttcagcaatttttagccatcgctacacatcaggattatctggaggagcttttgccaaaatatacatgttttagtcctgtgcaagatcttctaaatcagagccaatgagatccttgaacatgtaaatgatggtgaggaaagaaaaattcacttggcaataatatgtaggttagaggagagagaaaaggcattgaatgtaggaagaccagagaggaaacttttatggtgaactagttgtaagggaatgggaaactgaaaaatacatatcctcatgtacatataccctgctatacatctaccaacaacacctcttattgtttctgaaaatagagatgtttcagtgataaactacaggccaaatgaaagactagctcagtacaatcataaggtctcacatgaatagccaggatttggtgagtaaggagacaacaacttctttaggataacagttaatctagaaaattagctcatggaatttctttctggcctctccaatcttctttatttcctccatccatctatccaatacttattaagcacaactaatgtgccaggcactgtactgggcactggagatacacaaagtgaacaagctttgctgtggttcttgccttcaagagctcacacatcatgaaggagaaagacattacgtgggcaatagaagtgctgctacaaagggagtagagcatacacaggagttatctaaagagacttgggagctaagggaaatctcccatgtggaagtcgattttcaccaatgacctatgtaatgagtaagagttaactaagcaaagactatgtggatgtgtgtgtgttctctcttgtttgaagcctggagaatgagacaaaatcatgcaggactttgtaggccacgttacaaacgttggattttatcttaagaacgatgggggtcactaagcattaggtggggaaataatatgctgaaattcatgtttcaggaatactactatggcttcagtggagggattggaaagggtcaaaattggaggcaaagagaccagattttaaagtgtcttggaataagcatgagtgtaaacaaacaaaacaaaaagggttaattcacaaagcatcaaagaaaacaaagtcaaagcaaacaaatggccaataaatatatttaaaaagtccaactttatgagaaatcaaagaaatgtaaattaaaatgagatagcgtttaaattacaaacaaatgacagcataggagcttttatgcctatagtcaataatgcctacatatttgtattaggattgaaattgatacatattttgaaggccaaattagcattaaatttcaaaatagcttaaaatataagtcttctttgacaccacagttctatttcataaaatttttattatggaaataattgagatgtatgcaaagatagaactacaagggcactcaacacaccatatgtagcctgattgtctaacagtggagactgagttaagtaatgtactatacatcaaaagataaaataacatgaagcaattggaaatcaggttttataatatccaatgatatagagaaaagtttgtgatacattgtttcaaatgtagagtataatatagtatatatagcatatcatgtttgtgaaatatatctaaatagaaatattagaataccatattcctaaatgttaatgatggaccaaaggttaagaatgggttaaaagtgacatggtggggtgtgtgtgtgtgtgtatctgactgtctgtgtttttttatttaagcaaaacacaacattagcgatcttgttgcagtctctcaaggccttggtttctattgcacataatataaggtgtcatttgtaaggggaaaggcatatctctcccagctaaaatttcattttaactgaagtcatggtggcttaacacaatacaatgcataatggtgggggaaaatttcagaccctgtgggagaccagtattgaaggtgagtagatgattctcaagtcatactacatagatagtcatctattccacctacacctcaggttatacctgagcctatgcaaagaagattcagataaagagttgggaatcataaccatctagatggtaattgaagccctaggaaccaatgagtttgcaacaaggagaacgtgtaatgagagaagagaataacctaagacacaatcacaaagaacaatagcattaaaggaataggccaaggaaacattgctcacaaaggcaaaacaaaacaaaaacaacaaagtaggaagaaaaccaggagtgttcatggaaggtaagggcagagaaatttcaagtaaaaatgttcaggaggacaaatgctactgagagatcaagtaagatgaaacaaaggggtgtctattatatttagcaacaaggtattcatttgatgaccttgaaaagaatactttcaatggtgtggtagtgggacaaaacatttcagagggttggagagcagagattattaaatacagtggtttgaatatatgttttatttttgctttcatgaaatctcactgaaataacagtcaaagaatgaaatgtcataaacccacaaagacaaagagaatggaaaagagatgccaacaagtaaaagattgtcaacaaatgtttggaagctagaaagggatgaatgtgtggtaaccaataacagtccagagaaagctagatcaggaagccaacaacatcaagttgatttagtgccacagaaagttgaaagtttgcatgaggaacaactagatccacagatccatgcacactaaaccagagactacccttccctcattctggcaggatatgtgagttttactttctgctgatctttgacattatactaaaagcagtcttaaaactctcagctccttttccctccttggctcccagaatgctggcagccaggcttataccttccacaccgctgcccctccaatcaaaagcaggagattggaggatttcatccaagggaaactgacccaagagaaaagacctacagaactgacacttgggagtccatcaataaaaagccagcattccgccttataatcctatagcaaagttcaccaacccataaattattcccatccactcagagtttccagtcatcttttagtgcttaaactcaaacacacagccagtagtttgccagatatttaggaaaagacagcaatttaaactaacagagaaaaggaactgggaggaaacccagacaatgcagggtttagaagcaaacttttaaaaatgacaatattctcaagaagaaaaccaaatagttcgtatccacaaagcaaaaacagaatgctaaaaaagaaacaaggtgaaggatgagctcttgtgaataaaattaggaatgctgaaattaaaatttcaatagaaggatttaatgaaaaattaaggaagtatcttagtaaaataagaagacaaagtcatggaaaatggaaaagataaaattagagaaaaaaagtctaggatgtccaacagttcactaatcaaagtcccataaacaaagaagagaaagaataaaggggaggaaattattagcaaataatacaagaacatttcccagagctagaggtcaccagtctttagattagaaagattcactgagtgcccaggaaaaatgaatgacaaaaagtccacaacgcgccagacacggtggctcacacctgtaatctcagcactttgggaggccaaggtgggcagatcactggagatcaggagttcgagaccaccctggccaacatggtgaaaccacatctctactaaaaataccaaaattagccgggcgtaatggcgtgagcctgtagtcccagctaccagggaggctgaggcagaagaatcacttgaatctgggaggcagagattgcagtgagctgagatcgtgccactgcactccagcctgggcaacagaacaagaagaaagaaagaaggaaagagagagagagggagaaagagagagggaaaggaaaggaaaggaaaggaaaggaaaggaaaggaaaggaaaggaaaggaaaggaaaggaaaggaaaatctataacagaggcaaatcttgatgaaatttcagaaaaactgggttaaagataagatctttaaaacttctagatcgtaatggctattattaaaaggaggaaggataagtgctggtgaggatgtagagaaaagggaacccttatacattgttggtgggaatataaattagtacagccattataaaaaacagtatggaggttcctcaaaaaactaaaaatagaactactgtaggatccagcaatcccactagtcagtatatatccaaagaagttgaaatcaatatgtcaaagaaatatctgcattcccatgttcactgaagcattattcagaatagccaagatatggtatctacctaagtttctatcaatggatgaatggataaagaaaatgtggtatagatacataatgtaatacctttcagccactgaagttggaggaaatcctgttatccttgacagcataaatgaacctggaggatgtatgctaagtaaaataagccaggcacagaaagacaaataccatatgatctcgcacataggtggaatctgaaaaaatcaaactcatagaaatagagagtagaatggtggttactagaggctggtatgaggagggaatggggagttgttggacaaagggtataaagtttcagttagacaggaggaataagtttctgagatctgttgtgcagcagtgtgaatataatcaataataacatattgtatgtttcaaaatagctaaaagagtaaatctcaatggctgaccacaaaaaatggtgaggtaatggatatgttaattggctttgattagtcattccacattgtatgcatatatgaaaacatcacattgcaacccattaatgtatacaactatgatttgtcaattaaaagtaatattaacttttgtttaagcttctggattttaaaacataggttatattcaaaagatctggattcaaaacggcagtgaacgtctcaacacaataatggaagccaggagacaatgaagtcatgccttcaaaatttatttccaacctatcaagtgtgaaaattaacttgaaatatttttaggcaaaaagttcttgaaaatttacttcccatgtactctttcttaagaaactacaggagcgtttgtttgaaaagcttaagggaatcaagtggtacaggaaggggaaatccaggcagagcccaatgagttccctaaaattaaggagacagagctgagaatccaagtggacgaagttggctggagttcacaggacatagtaccagagaggaaaaagctgcagagagaattctagagaccttcagagtttccctctagtagtcaacagaatactgatcaacaaatgcatgcgaggaaactgcataatgctggggaaagagccacccaaaaagataagagggaacaatccctggtactcacataggtctagcaatagtgtgtgttcctaccagctaaactggaaaatctcatgactcacaggacactggaatagagtactcagaagggttttgcctcagtagtggagaaaaattgtctctagactaaacattgctctgatctcacctatcaaatctgaaaaccaagacttgaaaggatcaagctgttttcaagtaacttaactgtgtctcagaacaaagtttaagaatatttataggaatacaaaaatatacagcatcccgaaagagaaaattaacaagtctgatatccagtaaaaaattacctgataggcaaaaaatcaagaaaatacaatccataatgagaagaaaaggcaaccaattgaaacggacccagatatgacacaggtattagaattagcaagcaaggacataaaagcaattattttaactgtattccatatgttcagaaagctagaggaaaggctaaatatctttttttgttttcagagacaagacattgtcctgttgcccaggctggagtgcagtggcagcatcgtgacccactgtacccttgaactcctgggctcagaagatcctcttgcttcagcctcccaagtagctaggactacaggcacatgtcaccagatgcaggcttttttttttttttttttagatggaatctcgctatgttgcccaggctggtctcaagtgatcttcccacctcagcctcccagagtgctgtgattaaaggtgtgagccaccacacccagcctgaatatcttgagatatggaagacattttttaaaagacccaaatcaaactagagatgaaagttataatatctaagataaaaaatacactggaggggttaacagcagattaggtatcacagaagaaaaggctagtgaacttgaagatatatcaatagaagctatccaaaatgaaacacacttgcatgtgttttcacaatggcaaaaaaataaaaagactgcaaaacaaaaatagagcattggtaagctataggacaatttcagacagccaaatatacatgtaattggaatcccgaatagagaggaaggaagtggcataaaaatatttgtagaagtagtggcagaaaaaaagtccaaatttgcagaagttaattgatactgtctaaagttgaaaaaaattaaaactaccaatgtaaggatgttatttagaaatgtaaggtcatgccaataaaaacatctgatagagctgaaattgcttggctttgttgtaaaagtgtagactgtggcactagactccctaaatttgaatcttgcctgtgccccttactagttggacaattgtaagcaagttatttaacctctctgaacatcgttctctcatttataaaatggggataaaagtagtatctacctcataaagtttttttgaggattaagtgagttaatacttatgaaggcttaaaataatgcccagtacaaagtaagaactctattgataatggtattatcagagagcagacattgagaatgaggagattgctatttcttgcaatatgacttatagtaatattttactttctaactatgcacaaggtattacttggatataaatacattttaaatatttcagaagagtaaattaggggtgaagaaatgtaaagtctttcgcgaagtttgctgtgcagggaaggagagggacaggtgataattggaggggatatgaagtagaggaaagtcatggggtttttttgtttggttggttttaggtaggaaagacatgagtgggttaaaaatggatgtgaagtcaactatagagagggataaattgaagctatggaaaaaagagtgtatttggccaaagcacaaatgaagagacatctcttccattttaatcagaaggaaggcagaagttaatggatgtggacctaagtgtgttcagaagtttgatatgagaagttgaattcgctatttcacacttactgttctttgtaaaataagagggcatttactgagcataagcagaaaagtggcagagttggaattttgaggtaagtacaaaagatttgagatagccattatgatgacaagttaaaaagaaagctgaccaaagcaatgcagaaggatttcaggttagcactgaaggcccaggtgaggtttagaagctatacatttgtgatgcagtagtaccaacctctttggttatgtgattttctccagtagggtgctgcaactcaaatataggaatggaaaaagtgggactgattcaggattaggactttatcaggttggtatgttaaaaggacaatggggcaaggggattgagaatattgaaaagagagtatctgaagtgagaaatcacagatcctaaataggctaaagaaagaagcgaagacaggaaatagctggtaggtcggaagaaagtataggagtcaggccttagcagtctcaacaaagttgaagtatacacgtatttgaagaaaaaaagaattgttggccgagggcagtggctcacgcctgtaatcccaacagtttgggaggctgaggcaggcatattacttgaggccaggaattcgaaaccagcctggccaaaatggcgaaaccccatctctactaaaaatacaaaaattagccaggcatggtggtgcatgcctataatcccagctacttgggaggctaagtcaggagaatcctttgaacctgggaggcagaggatgcagtgagccaagatcgcaccactgtactccagcctgggcaacagagtgagactctgtctcaaacaaaacaaaacaaaaataagaaaaaagagttgttaagtagagggtatagttaaaaactggcatgttttaagttatgatttcagtgcaattctgagtgatggtgaagttcattcagcatgtggtccatgaaaatgggtggatgagatggagctctgaggtgagagtcactgttggaggggatgttaaagaagctagatggctaaagcattagatgagtcagccatgtggttgttgctgaagtcacccaaaatgatggcagaggcaatgggaggaacactgcgagcctggagccaaggtcttcaatgaatgagaaggagatatatggaggtcaaatctggccttatgagcctctgcagccccttgaagtcttggtgactatactgaacaatgtttcactttagaccctggtttttttgccagtggtctatggatgggcttctaaggatctgcaagtcctctgaaatagtatagaaaattatctgtgtatatttattaaatgcattgtttttcctctggaagaaggttcatgactctcatctaatttagaaaggggtgagtgattaaataaaggcctaaaaattactgccataaaggatttatgtgcagaataactaaatgaaagcaatagaaactgcatgcagactgagaagagcacgcacctatcaatatagctaaaagtttctctacccttataccaacaccatcatagaaaactcatgcgctgagtgagcagcaaggagctatggcaatagctacggctggtacttgactgtgccttaaaagagctgataggctgcagagacagagacaagggtccagaaatccaaagggtaatttaccactgaggctcaataactacttaactggtaaaatcttcaggtggcagctgttagatacatgcctgaactttaagtgactttaaattggcctcttttcacaagagcaggcatttccaaagaatataaggaactgacctctcagcaatattttttgcagactgtagaaaccgtgcctggtcattttctttcaggatatgctcagcttggttgatgaggactgttgaccgttcaagacactggcggcaattagcaacctgctgtgccaactttctcagtttcataacctttaaggaattagtaaaagaaaaaaataagataaaacatgcagtgcttaattaaaaacaataaaaaacaacatgaaggaggcatgctgcagtgattctaaaaataaggtttattaatattccatggtccctgtactaaccactcaccttctcaccctacccactgtgtctcttgtgccaacccctccttctcttatctactgcttgcatacttaggctgcaacacagtcatatactctcggttatctacctcctctgtgtattagtaacactaatttttctggttataaatcaatgcatgcccattatagaaaattcagaaaataaaaagtataaaagaaacactaccacccagagattataattgtttacatttttgtttgtttacattttgttgtcaatatattttcacatatatgtttactaaaaagtaccatctttttctttatgagtatctacagttctatgtacatatttctctaagtgtctttatgcatacctgtgtgttcacaaatctgtattcttggaaactttagtttcctggataagctataaccactcagcatggcacaaattattagtgatcactctagcctctcaaaacatctcacattatacacacagcatgaacttataaccactaacactgacgagcaagccaacaagcctaaaaccatatagctgtatggaggctcacacttgacgcttatgatcatgattcttcagttcccaggctagaaacctgaatgtcttcactgagtcttccctctctctcattcgtcttttatatttaaaagttcaatgtttcctatcgtttcctttctagcagtgcctgttgtgttcttccctcccatttgtgctgccactactctggtttaggtctttatcaactcttacaaagcatcattccataagtctcataacttgctaccctgactttggtatcatcccattctgatctaccctgcatacctctgccatatcaatccgtctttctcccttcctaagaaacgagaatggctgcccaacacttttcagattaagcccagagtcctcatcctggaattcatggtccataatcctgactcacatttctaccattacttttttccttttcattgagttataacatacaacagtaaagcacccaaatcctaagtgtacagctcaatgaacttttgcctacacatacacccacgtaaaccaggtcaagatatagaacgtttctaacaccccagaatggccatcgtttttactggattcagagcagtaggccaaacatcacttctttgcctctccccctataatctcatttcttcttgatttcatgatcaaaccagaatcatctggatcaaactttgatatttgtaaagtcaacccttccttggattcactgaagtgctgcgctttacctttgtctctttgattttgacagcgatcatttgcttcctctgctggatgatctctaccaactcgtcacattcttccataagttttgcctcatgcatagcagtattcacctgccaagaaatttcagagtattacacagtgattgttgcctttgtcccctgctggctctaaaaggttcggactgacagctaagcatgcacaacttcttccatacctccctcataagatccactcctagaagaagggtagagatgatgatattaatgatgcaagggcattgaagcaccacagttaggaagctctccaggcctctggtagatcatgatggttaatggaaggctgggcagaaggacagatgagatgggggcatgttattcccactgaacaattccctttactccagtaccctttcctcctgctgttcttttggaaagagggtaaggagatttatgtatgtcaagaaaagagtatcctcctccacaggcacaatattaagataacattacaacaatatattgtgctaacaaaaatattttcagttttccttgttcccttctaatttttcacattaaatatatcattaaacatatattcatgtgtatatatttttcagatagttgtcgtgttttagtgggtatttctcaccttgggctgtccagtatctgaatacctttcctattttgggatactggctacatcaaaacatctttactgcaaagtcagggttggaaaaaaaaaaaaactaccattctgcattttctttccatggattgatttctccttctcctcatctctattattattgacactagatggtacagagcccccaggaggggctaaaatgagagcaggggattttggggctgcccaagtataacaggaaaggaaggagaaaagaactaacatctttttagtacttaacttgccaagcacttcataggtaaattatttcatgtaattatcataacaattttacaatataggaaccatgtttattcccatttcacatacggggaaactgaggcgtagagaattttagtgacttgctcaaaaatcacacaactagtaagtggtaaaaccagaattcaaaccgagttctgtcaagtgaaacccctgggctggctgggtgggcgggcgaggttcagttccatttcagcagcacacagagcagtcatacagggaagcacaagcattccaagagtctattcaaggatcactcgagcagagctctagaaggctgaggaacagacaatgggttacttgagagcatcaaaactcaaggggctagatgtgcttcattagcaaggtagggctgcatttccaattgctatccctcttcagagggttgctccatattctccaacccgagcaaaatacctgtcactggaccctactaccccctctctcatacttgaagctcactgatggctaattttctgtttcctacttaactgaaataaaatatgtctgttgctgagtgacaatcttatgttgcttttttccattttctagggcaatgtcacaactggggcttctgtttactctgaatggcactctagccattctacttttttttctcagacacctcaccctttccctaaattggatctacctttccaaggcagatatctcaccagctcacgaactcctttatctgagactaagagattcatttagttttctctgggtccttgcttacagtatctagaaacttagacacttgccatttataatttcttttttaggtggctactggtgtagtacacaatgatgtcgtacctggtttcttaaaatgtaatcctcggactagcctttacataacactatatgcctggcattgctctaattagtttacatatattggctctctcaatcctcaaaacagtcccgaggtaggtacctttatctacatttgacagatgaggaaaactaagcacagagagattaagtgacttgcttaaggttacacagttagtacatagcagggatgagatttgggctgagagagtgcaatactagagactacacgtttaaccttacacatatgctgctctccagttgagtgtaacaacacccttttcttcaatttctgaaaatcatcatctctttcaaatcatccatctttattctgtcatccgtttctcattagtcacttcagactccttgttgttcccctagaatgccatgcactttcatgtcctgtgcctttgcccgagattgtcattttacttggaaagtcatttccccatctgtttactgaacacatttctacttatcttttaaggcccttctcaaagatcatcacttctatgatttttctcacttgcttggacacaagcaattgatcccctatttatattttcacatactctatatatagttcaattataccatttcctatattttatcatattagtctgtcttcctcactccatcatgagttctggagggcaagaattgtgtcttatgtgactatatctagctccactatcatgatgggcacatagtagatgctccgtaattatttgttggattgaattaaatgtgaaaaaaggtatcttttactcctcattagacatgtccactttgttactcaagttaccctaaactcagtaagtctaaaaacaaacttatcaccttctctccagatctggcttccacctctgattttcctatttttgtgtcaatgctactatcattattgcagttactcaggttcagtaaactctgactgctacttctcctttgtccccacataaattcacagcagtcccaaagtccttccctcctttcctttttaatcatgctaaatttcctcagtggctggtccaagtgcagtagtgtttacaaccaactgatcgcaaatagttacaggtttctttgttccttctccattcccactgcttcacttgactacccttattcgttaatatagtgaggatctgagccaaggaaccaataggttgaagcccttatcacctattgtgataggactgttgttgcaaaaacctcgttaattaatctccctacctccagaatatttcctttgccacccatcctcataatccttcctctactctgaagccaggaaaaatcatgtcttcattaccagacatcttatcaagcatcttttctgtgcaaagcattatgctaaggccctgccctcaaaaactttgcaaactggatggggaagagccatatacatataaaagaaaccaatcaaggtagcataaattaaatactgaatgggtgatgtagactataatctactgaaattaaaaggaaagattacttttggtgggtaagtgaaggaaagatgcatggatgaaatggaagttgaattaaatcttaaagatggaataagacttagattaaaaaggtgtgaaggagagaaatttcaagccaaacaaatgagactgaactttatttttaggcaatatggtatctttaagtagtatttttgaggggaggaaaggtaaggtggtgcgagaagtaccacagtgaacttgtttaagaagatgaacagggactgatttgatggagggtaatagtaaacctgaggactatttaggaggctgttgtgatgtggacagggcatacccaaggagaatatcagtaatagaaaggaaatatcaaatataagaagcactcttttgcttacatatcttcaattagacagcaagctccttgagggaagattttacactactttgtctctcccattataactggtacaaagccttacaacaaacatttactgactgatttagcacagtaaaaaaatcaaaataagaatgccaagcattataaaatatactccagtgagtgtattttgtagagaaaatataaggtgaaatgagggagctagggtgggaatgttttttggacagtcacatcaggggagataaaaccaggcacaactaatagaatgaaaagttggctgaagaggcacaattccaaactaaaggtaaagcaatgacattaaaatcttttcatgtcaagaagcaccccagaagagcagggtccttaagtgttttctgaacaggaaatacttcagggaaaaccggtctttgtgatgtgaataaaacaactcaaattgcttggaagacatttgaaagcccctggtattttctttgtttgaagacataatacattgaggtatttcacttgcttattaacgcttaattgaaaataactgggttaccttaataagcatacttggctggttggttggtttgtggaagaccctagctctttatttgacattcgctctttgtattaggttagtggttttgtctaaatggctttatgtctgtggaaaaaaaatctatcctccttgaaaataccattaggtcaatcttggcaacctacttgtataaatccacccaccccaaaaagacttttgggaggcagtttgtgatgtttatgactaagagtcttagcctcaatcttccaagtcctaaacactaggcaacacaggctccctggtaagtctccaggtcctcttctctgctctttgctcttttactttcttcttaaggcagcaaaaatttgacttgcatatttctttccaactgcccatcctaccctattacctcccagcccaaagactgactgtagagtaagacctagtcttccccaatttccacctattcttaatacaaacacataaggcccctgatggaaggactttaccactgttcaatactaggaaataaataggtgggagttcgccaaagccataagttgcaaagatttaagaaactgcaaaaagttattttggcaattgtttctcttctgtattgaaatgtaaatggactagacctttttacccttagcttctttcagagagcttatttgatagttaggatttttggggggggggagggggagggggcaggggagatattccattgctcattctatagttattttattcctgggtttaaagttcatcagccttccctccaacccactcccacgataacttccccacttccactttcacctcagcttagtcacatccatcagtcctatagtgcatcattgcacaggagttcagaaggcactgagatttcctgttcagatggaacaagatatatgaaatagtagatgatcccatatacccagactcaagtgaaatgcaataataataataataattatatggcaaggaattcctcactggcttctccgtctcagtgctctccactctacacagtaaatgccagcctagtttattctctgaaatcttctgcccaaatagatctccctttcaccagaatattgtgaaattttggcattaaagttcatttggggaagtttttatttcaacaaacatttattgagtgtctcccacataccacagtatatcccacatgtatccagcatagtgctgggtttccctgagtgggatataacgatgaaaatgactcagcttctgccttcaaggcacttacagtctagtagagactatgagtgtgaatacaactaattataatttaaagaccagcaaaacaagtaatataatagaatacaattaaaggtgtatgagatcataggaaagagaaaatttggaaaaggacaatcagaggattagataaagtttcatgtagctgagctggtcttcaaggatgagcaagacttgggcagctagaaatggagcttaaggggagacaagtttaggcagaatgaattacatgaatagcatgagcaaaagcataagcagaaaaatagaaaacgtgcttggttaaagcagatcagcctgacagatgtaatggaggcaaacaaggctagaaacaagggttggagatatattatggagagctgtgctgtcattttgagtctctgaaagtacttggataaaaatgtcaggatcttagcattatagtaacaccttaagaattgttaattgacatcttagttgagagcaaggtgaagagagaaggcagacacagtacatgaagaactgggagggggacacaacaaacttcccacttcccattattgcccaggaccactcaggtgatcactatcccaccttctgagactccataacagaaaaaagaggctgagtttggctttatttaataagcagtcactttctgtgcaaaggagatgagaaggaaaagtgagaggtaaattggacatctgatgaattatcaagaaattattatgaacagccttgtcaccttactgagctgcaaagaattcattactttcttaaaatgatgcatttaagaaaacacaatgtttatgaacagacatagcatttgctgtggcagcatcaaagctaaagtgttaacccagatcacactttaaggatccttctccctctctcctcccaccctcacactctctcacacgcacacacatacacacacatcactaccactagcactagcatcatgatcaccaccagcactatagccctgttatatcaggaagtttcaaatgtacaaaaggaagaggaagaagagacaatcttcttttttgttttctaaaggtaaacactgcaacatttcaaagatggtccttccagctttacgtaagtatgactaaatgaagcagggatttaaaaaaaattggttatacctgtttctttagatttgagggagggtggtcacttaaaggagcaagaaataaatgaaattattaatagaatttttagtcacctgtactggagtaactacagtttagcaagcaaaaaaaatactgagacatagttaaggaatctacagcttcagtgtgtaatttttttggccagggaaggggtgagggattaggagagtagaggtagctgggagattggctgttaaagttagaaaagtagtgtggatggggaggtggcagccaagccatttctagaagtataactatcgtagtgaattgggctcagggactcatgctacgtgaggccttcagatagacaatgactgacagaaaagttttctatctgcttgtgggaggagtacataagagttaatacttttatagtgctaaccacatgttaggcactattctaattgcttcatgtattttcacttgtttacttttcccattaaccccataaggtaggtactattattaccattcccattctatagaagaaaccgagaaaacatagaggttatgtaacttgcccaaggtcatataactagtaaatatcagagccaggatttgcacccaggcagtctggctcatgtctatggttttaaccactgtgtgtatgcgtgcgtgtgtgtgtgtgtgtgtgagagagagagaggctgtgctcacaaacatatacttctttttcctttagagttgcctctcacgacaatcacaatctctagagttaaccattgcaaatattttgtgtatttccttcctgacttttgaaaaaaaatagtacctgtatagaaatgcataatacaacatattttaaaagcatagacagttcacacacatatatatacacacatatattttgtatgtactttactctatgtctaactaataaaaataatggagacagagcgtgaggacaatctgcttcatatacatgccttaggaatggcattatgccatgtggccattctgtgttgattttggagtcctttctcctcagggaacagacaaccaaacctttatagccttaggcttagttactgtctcccccatattctctttgtaagcaaagtaactgtttattttttatttttttagacggagtcttgctctgttgtccaggctggagtgcagtggcatgatctcggctcaattcaacctccacctcccaagttcaagtgattctccagcctcagcccccaaacccccccaaccccgccgagtagctgggactataggcatgcgccaccattcccggctaatttttgtatttttagtagagatgggtttcatcatgttggccaggctggtctcgaacacctgacctcaagcgatccatccaccttcggcctcctaaagtgctaggattacaggtgtaagccaccaagtaactgtttggaacatggaagaaaaaggtgggagatataacctatgtttttcatctggtattttatgtacatagctataaaattttttgtgaaatgaggcagaaacctcctttctatctcgtcagaaccatgtaattagatcttaaaaagactgaagaaataatcgattcctactccatcacttaagagacagaaatatggggcctagagaggggagaggcttatccagcatcacattgctactaaatgacagggcaaggcttgagccagatcttctgagtcctatccagtgttctttccaatctactgcttgttttgtaaagcatggcacttgcttataaatccctctgaagaaataaaactctctagctctcatccttgtgtatttaccctagaaatatgaacatttatgtccacacaaaaaccttacacgaatggtcataacagctttgtttctattagcaaaaaactggaaacaactgaaatgctcttcaccgtgggcacatataaacaaattgtagaatattcacatagtagaatactacttagtaataaaaaataaaaaactattgatgtacacaacaaattcagtggctctcagggccattatgatgagtgacatagcaaatcacagtattttacatactatatgattccatttacataacattctagaaatgagaaaattatagtaatgatgaacatatcagtggttgctgggggacagatgtgcctataaagaagtagcacaaatgagttttggggggatgataaaacaataatgtcctaattacagtggtgattacaagaatctataaatgtgataagattaatagaactatccaccccccccccaaaaaaagttgagtgcatgcaaaagctggtaaaaatcaaatgaggtctatagtttgctcaatagaattattgtaccaatgacagtttcctagttctgatagttgtgtggttatgtaagatgttaacattagagaaggttagttaaatgtatgtgggaactctctgtattattttagcaacttttatgtaagattaaacttatttttaaaaagaaaaaagaaagaaaactctctagaagtcccataatgttttaggcaggcctggtcaaccaacatttctgtagttttctgaagttctaatatatcttcaggcctttgctcaactggcgttctctctctctctctctctttcacacacacacacacacacacacacacacacacacactcaccccactctgtaacctagtttatttttatccgtaatacttataatccctaataaaaatatgtttgtttattgtgtgtctcctcccattagaatgtaagctccttaagtttaagcactttttgttcactgtatccctaacacctagaatagtgcttgtcacacagtaaatgctcagtaaatatttgttgaatgaatgaatgtgtgtaggcattgaaataaaggtattatgaaaaaaggtattgtatactatgttacatttctttattacatgagacaaatttctctttcattttatttttgcacactcaaaatagttttatctgttgtgtcatttaaatattgttttctgaattatgaaagatttggagagacgttggaataacaacacctctaggagacctaggagattctaggagaccacatattctgaaatatttcctttccctgtgttaaaataaataaaaagttgcctttcctaggtgctttactcacctgggctttactcacccttatgatgcataaaagattgtacttacaacatctggccaccagatggcaatgtttatccaaatatcctttctcggtacctattcgtgtaccaagccatgtgctgggtataaaaaaaaaaaggataggacaccatactcggcctgagagcttagtctggtggggagacaaatcggtatatagaagtgctatgatgaaagtatgcacaggttaccctgaagacacagaggaggaacacctgaaccagatgagggaggcagggaatgaggcttagagcatgggtgatggcttcttaaaggaggtgaaggctgagctgagcagtactcctacagatggaaaatcgaaggagtgtaagttctgtgaagacaggtgcgacgtccaccattatgttgccagtgcctggcccaatgcagaaatgcgcttaaatatttttggaatgaatgaacagcatataaagtacagatggcaaaaggacatcattagatgtgctagtactttatattattttcaactttcagaataactcttcaaagtacatactatcatcctattttttagatgaataaaatgaggttcagtgtacgcagcttataaaacagagccagacagactcaagtctatcacttttctttccacttactgtctcccagtgagcatattactattaataagtcaactcatattctgcttaaaaggacttggaaaagtgcttcacaatattgacattcctccaaaaacaagataaaatatatctacttaatcgttcctttttaaaagttttaaattgacttgtttattttcatgttaaaaatagaatcaactaaaaagttaacataatggtatattctcaaatcagctacccgatttctttaagtaataatgagacatatacatgccttttcaagacaggttaaagaatcaaatagcagactgttaacctgagatattaacaaaatataaacattctagtaatatttcagctaataagcaaaattcatagtttcatagtctagcagtaaaaagaagcactgacaaagactgtgttttttacccgaagtgagaagatctgtgtaatactacattataggatcaaaaggacattaactgttttactgttttataatgtttatgggagatatttcaataatagcactgtttttcagaaagccgtaagaacatgaaagattatagacagacatcactcttaccatggaggatacacccaattcttgaagcagtcaacactcatttatgtggatacattacaggtcatttcatattaccattgaacaaattttactgttattatgtgctaggcattttagtaagcacttagcaatacacgagatagataaggcctctgccatcatctcgtgaatcttataatgagcagggaagcagatactgagcagttacctgtttgaggagtgctacaaaagaggtttatcacgtaaaaaggataatctttgggtgcttataagatggggatttaaccaacagttgtcaagtggggagcttagatggtcaaggaaggcttcctaaggatgtgatatttttaaggaatgaatgagagttagctagaggaaggggagattcacagcagagaagacgaagacagcaaaaaggtctgggagaccatgctagagaggtaggtaggggccagatcataatgggttttaaaggcagtgggggaaccattaaagggtttgtggtagggagtgacatgacaggttttgcattttacaagttcatttccacagcaatgtggaaaatggataggaggggaacaggatgggccagagagaccagttagaaactgcagtttccaaaatgattgtggcatggccatggctgctaccttcaggaagcttctagtccaaccaaggaaacagcctgtaaccaagaaattccttcatggaagagcaagcagtctaatagaggtttgcacaggctgttccacccaagttcatgtgactagtgggtgacagagccagcagcagaacccaggtttcctgatttctagtctagggctttttccaaggccatccttttcactgccttcacaaccaaggaattatggaaagggaggagaacaaagcaagccagtgaatgtttccgccttcttaagtctcagatcagattgtggggagcatttagccactctctgtactcaagtctgacataagcactcctcccaagacatttgtttctgagggatggattcaccatcgtgatactccctgtatatatacagagcaaggaatttctactgggagggccagggaaatttgaactctcatagctaaggtcgaaaagggcattgttatgagaaagaggtcattctttctgagacagggaactctggatgacaaaagggaaaaaatctgattccaggcagacagaaaacagtctgattccagcccaacagaagaagcaagggcccaagtagaagagtgaaaatagctgaagaagagcctatgttgcttctaagctgagggagtagagaaataggaagtaccaggaaagagcctgaaagacaaggaccagaggaattctgtttgtaagcatcagagggaagggaagcctcagaataataaccaacgctgaactctgtgactgggcaacaaagaggtcttgagaacatatttccagaggtctcaactaccttgtgagtcaagaaataaacaaaggggtttctacggggaaaaccccaagggggtcagaggccctgattaggatgggctgggcgcagtggttcacacctgtaatcccagcactttgggaggctaaggcgggcagatcacttgaggtctgttttaggctcagcctgaccaacatggtgaaaccctatctttattaaaaatacaaaaaatagccaggcatggtggcgcatgcctgtaatctcagctactcgggagtctgaggcaggagaatcacttgaacctgagaggcggaggttgcaatgagctgagattgcgccactgcattccagcctgggtgacaaggtgagactctttctcaaaaaaaaaaaaaaaaaaaggtataaaacaaacaggaggatggagccaagatggccgaataggaacagctccagtctacagctcccagcgtgtgtgacgcagaagacgggtgatttctgcatttccaactgaggtactgggttcatctcactggggagtctcagaaagagggtgcaggacagtgggtgcagcgcaccgagcgtgagccgaagcagggtgaggcatcgcctcacccaggaagctcaaggggtcagggaattccctttcctagtcaaagaaacgggtgagagacagcacctggaaaactgggtcactcccaccctaacactgtgcttttccaatggtcttagcaaacggcacaccagattatatcctgcgcctggctcagagggacctaatcccacagagcctcgctaattgctagcacagcactctgagatcaaactgcaaggtggcagcaaggctgggggaggggcacccaccattgccgaggcttgagtaggtaaacaaagcagctgggaagcttgaactgggtggagcccaccgcagctcaaggaggcctgcctgcctctgtagactccatctctgggggcagggcatagccaaacaaaaggcagcagaaaactctgcagacttaaatgtccctgtctgacagctttgaagagaggagtggttctcccagcacacagctggagatctgagaacagacagactgcctcttcaagtggatccctaacccccgagtagcctaactgggaggcaccccccagtaggggcagactgatacctcacaaggccgggtactcctctgagacaaaacttccagaggaaagatcaggcagcaacatctgctgttcaccaatatccactgttctgcagcctctgctgctgatacccaggcaaacagggtctggagtggacctcccacaaactccaacaggcctgcagctaagggtcctgactgtaagaaggaaaactaataaacagaaaggacatccacaccaaaaccccatctgtacgtcaccatcatcaaagacaaaaggaagataaaaccacaaagatagggaaaaaacagagcagaaaaactggaaactctaaaaatcagagcgcctttcctcctccaaaggaacgcagctcctcaccagcaacagaacaaagctggatggagaaagaatttgatgagttgagagaagaaagcttcagatgatcaaactactccgagctaaaggaggaagttcgaatccaaggcaaagaagttaaaaaccttgaaaaaaaattacatgaatggctaactagaataaccaatgcagagaagtccttaaaggacctgatggagctgaaaaccatggcacgagaactatgtgatgaatgcacaagcctcagtagctgattcgatcaactggaagaaagggtgtcagtgatggaagatgaaatgaatgaaatgaagtgagaagagaagtttagagaaaaaagaaaaaaaagaaatgaacgaagcctccaaaaaatatgagactatgtgaaaagaccaaatctacgtctgattggtgtacctgaaagtgacggggagaatggaaccaagttggaaaacactttgcaggatattatccaggagaaattccccaatccagcaaggcaggccaacattcagattcaggaaatacagagaatgccacaaagataccctcgagaagagcaactccaagacacataattgtcagattcaccaaagttgaaatgaaggaaaaaatgttaagggcagccagagagaaaggccgggtcccacaaagggaagcccatcagactaacagcggatctctcggcagaaactctacaagccagaagagagtgggggccaatattcaacattcttaaagaaaagaattttcaacccagaatttcatatccagccaaactaagcttcataagtgaaggagaaataaaagcctttacagatgagcaaatgctgagagattgtgtcaccaccaggcctgccctaaaagagctcctgaaggaagcactaaacatggaaaggaataaccggtaccagccactgcaaaatcatgccaaattgtaaagaccattgaggctaggaagaaactgcatcaactaacgagcaaaataaccagctaacatcataatgacaggatcaaattcacacataacaatattaaccttaaatgtaaatgggctaaatgctccaattaaaagacacagactggcaaattggataaagagtcaagacccatcagtgtgctgtattcaggaaacccatctcaagtgcagagacacacataggctcaaaataaagggatggaggaagatctcccaagcaaatggaaaacaaaaaaaggcagggtctgcaatcctagcctctgataaaacagactttaaaccaacaaaaagatcaaaagagacaaagaaggccattacataatggtaaagggatcaattcaacaagaagagctaactatcctaaacatatatgcacccaatacaggagcacccagattcataaagcaagtccttagaggcctacaaagagacttagactcccacataataataatgggagactttaacacccccgcattgtcaacattagacaaatcaacgggcagaaagttaacaaggatatccaggaattgaactcagctctgcaccaagcagacctaatagacatttacagaactctccagcccaaatcaacagaatatacattcttttcagcaccacaccacacctattccaaaattgaccacagtaaagcacttctcagcaaatgtaaaagaacagaaattataacaaactgtctctcagaccacagtgcaatctaactagaacgcaggattaagaaactcactcaaaaccgctcaactacatggaaactgaacaacctgctcctgaatgactactgggtacgtaacaaaaggaaagcagaaataaacatgttctttgaaaccaatgggaacaaagacacaacataccagaacctctgggacacattcaaagcagtgtgtagagggaaatttatagcactaaatgcccacaagagaaagcaggaaagatctgaaattgacaccctaacatcacaattaagagaactagagaagcaagagcaaacacattcaaaagctagcagaaggcaagaaataactaagatcagagcagaactgaaggaaatagagacacaaaaaacccttcaaaaaatcaatgaatccaggagctggttttttgaaaagatcaacaaaattgatagaccactagcaaaactaataaagaagaaaagagagaagaatcaaatagatgcaataaaaaatgataaaggagatatcaccaccgatcccacagaaatacagactaccatcagagagtactataaacacctctaagcaaataaactagaaaatctagaagaaatggataaattcctcaacacatacactctcccaagactaaaccaggaagaagttgaatctctgaatagaccaataacaggctctgaaattgaggcaataattaatagcttacaaaccaaaaaaagtccaggatcggatggattcacagctgaattctaccagaggtacaaggaggagctggtaccattccttctgaaactattccaatcaatagaaaaagagggaatcctccctaactcattttatgaggccagcatcatcctgataccaaagcctggtagagacacaacaaaaaaagagaattttagaccaatatccctgatgaacatcgatgcaaaaatcctcagtaaaatactggcaaaccgaatccagcagcacatcaaaaaccttatccaccatgatcaagtgggcttcatccctgggatgcaaggctggttcaacatacacaaatcaataaacataatccagcatataaacagaatcaaagacaaaaaccagatgattatctcaatagatgcagaaaagacctttgacaaaattcaacaacccttcatgctaaaaactctcaagaaattaggcattgattggacgtatctcaaaataataagagctatttatgaaaaacccacagccaatatcatactgaatgggcaaaaactggaagcattccctttgaaaactggcacaagacagggatgccctctctcaccactcctattcaacacagtgttggaagttctggccagggcaattaggcaggagaaggaaataaagggtattcaattaggaaaagaggaagtcaaattgtccctgtttgcagatgacatgattgtatatttagaaaaccccatcatctcagcccaaaatctccttaggctgataagcaacttcagcaaagtctcaggatacaaaatcaatgtgcaaaaatcacaagcattcttatacaccaataacagacaaacagaaagtcaaatcatgagtgaactcccattcacaattgcttcaaagagaataaaatacctaggaatccaacttacaagggatgtcaaggacctcttcaaggagaactacaaaacactgctcaatgaaataaaagaggatacaaacaaatggaagaacattccatgctcatgggtaggaagaatcaatatcgtgaaaatggccatactgcccaaggtaatttatagattcaatgccatccccatcaagctaccaatgaccttcttcacagaattggaaaaaactacttgaaagttcatatgaaaccaaaaatgagcctgcactgccaagacaatcctaagccaaaagaataaagctggaagcatcacgctacctgacgtcaaactatactacaaggctacagtaaccaaaacagcatggtactggtaccaaaacagagatatagatcaatggaacagaacagaggcctcagaaataatgccgcatatctacaactgtctgatctttgacaaacctgacaaaaacaagcaatggggaaaggattccctatttaataaatggtgctgggaaaactggctagccataggtagaaagctgaaactggatcccttccttacaccttatacaaaaattaattcaagatggattaaagacttaaatgttagacctaaaagcataaaactcctagaagaaaacctaggcaataccattcaggacataggcatgggcaaggacttcatgtctaaaacaccaaaagcaatggcaacaaaagccaaaattgacaaatgggatctaattaaactaaagagcttctgcacagcaaaagaaactaccatcagagtgaacaggccacctacagaatgggagaaaatttttccaatctactcatctaacaaagggctaatatccagaatctacaatgaactcaaacaaatttacaagaaaaaaacaaataaccccatcaaaaagtgggcaaaggatatgaacagacacttctcaaaagaagacatttatgcagccaaaagacacatgaaaaaatgctcatcatcactggccatcagagaaatgcaaatcaaaaccacaatgagacaccatctcacaccagttagaatggcaatcattaaaaagtcagtaaacaacaggtgccggagaggatgtggagaaataggaacacttttacactgttggtgggactgtaaactctttcaaccattgtggaagtcagtgttgcgattcctcagggatc

SEQ ID NO: 58958 - DNA, 971 bp, Homo Sapiens
ggcacgagggtcaagatggcgctggtggcttctgtgcgagtcccggcgcgcgttctgctccgcgcgggggcccggctcccgggcgcggccctcgggcggacggagcgggcggccggcggcggagacggcgcgcggcgcttcgggagccagcgggtgctggtggagccggacgcgggcgcaggggtcgctgtgatgaaattcaagaaccccccagtgaacagcctgagcctggagtttctgacggagctggtcatcagcctggagaagctggagaatgacaagagcttccgcggtgtcattctgacctcggaccgcccgggtgtcttctcggccggcctggacctgacggagatgtgtgggaggagccccgcccactacgctgggtactggaaggccgttcaggagctgtggctgcggttgtaccagtccaacctggtgctggtctccgccatcaacggagcctgccccgctggaggctgcctggtggccctgacctgtgactaccgcatcctggcggacaaccccaggttgaaagacaccctggagaacaccatcgggcaccgggcggcggagcgtgccctgcagctggggctgctcttcccgccggcggaggccctgcaggtgggcatagtggaccaggtggtcccggaggagcaggtgcagagcactgcgctgtcagcgatagcccagtggatggccattccagaccatgctcgacagctgaccaaggccatgatgcgaaaggccacggccagccgcctggtcacgcagcgcgatgcggacgtgcagaacttcgtcagcttcatctccaaagactccatccagaagtccctgcagatgtacttagagaggctcaaagaagaaaaaggctaacgattgggctgccacaggcttacggccacacgtgcccctgtgggtcccagggaggtcttaaacaaggtatttttcaacttaaaaaaaaaaaaaaaaaa

SEQ ID NO: 58959 - DNA, 534 bp, Homo Sapiens
tttttttttttttttttaagaaaaaacatgattttgatcattgtaccacatgcctttataaacttttggtgttatgatgcaagatctaattattatcaaatgtagtgacgcttgttccaaattctaaaattgtttcaattatgccttggttaggggtgacaggaaggctctggtctttagcttatggtacatgcctttcgtcgtctcattttcgtctggagatcctgtatctcatttttcattattctgctttctttttgaaatccctcttttagtagttgctcctgttcctaaaaagggacaaacgaaggctgagtaaagtgtagcatcaggcaaattgaaacattctatctggtttccacattaaatgatttgttatttaattttctctgagtcacgcaagacgtaaatgtcatactttggcctatcattgaccaaagcacagccatgttccttaccctattatgtatatgacataacaccgaaataagcaaagtatcctcaaaatcccataaggtgtatgaatcatggatt

SEQ ID NO: 58960 - DNA, 443 bp, Homo Sapiens
ttttttttgtttgagacatattaaacaagctttatttaataatgctcaatttgacttttccaatttaaatatgggctctgatcagcaaccatttgatcccggcttcatttcaggctgaagaataatttcttctggttgtttttcttcggtgctgggttgatcctggggccgagtggctgctctcgagttccctacatttctcgagtctgtgcttctcacttgcagggtgggcaatgccatttctgcagccgtccagggctctggcaaatgttaaggctgtcactgtagacagaatccccatggtctgtctgtgtgcctcgatagagtccgaagaaaaacattcctcgcattcctgacggttggtcctatctccgggccttggactcggccctgcaggctcgtgtcaccccgtcaaacggcctaggccacggctaatctaaacc

SEQ ID NO: 58961 - DNA, 388 bp, Homo Sapiens
ctttgagattaaataaaaaaaaaaaaagaaagaaaaatgcaagtttctttcaaaataaagagacatttttcctagtttcaggaatcccccaaatcacttcctcattggcttagtttaaagccaggagactgataaaagggctcagggtttgttctttaattcattaactaaacattctgcttttattacagttaaatggttcaagatgtaacaactagttttaaaggtatttgctcattggtctggcttagagacaggaagacatatgagcaataaaaaaaagattcttttgcatttaccaatttagtaaaaatttattctttatctcatttatcttatgggggaaacacaggaacaaattctctaagagactgtgtttctttagttg

SEQ ID NO: 58962 - DNA, 620 bp, Homo Sapiens
  misc_feature (607)..(607): n is a, c, g, or t
  misc_feature (614)..(614): n is a, c, g, or t
agtagacggacagaggagtcgtagcggtcgaggcttttgcggctccggcgtgccggaaagtatgttatgcataaaagtggataatttacatgataaatgaaaatggccaattctttaagaggagaagtactaaaactttataaaaatctgctgtatcttggacgagactatccaaaaggagcagactattttaaaaagcgtttgaagaacattttccttaaaaacaaagatgtgaagaatccagagaagatcaaagaacttattgcacagggcgaatttgtaatgaaagagctagaagctttgtacttccttaggaaatacagagctatgaaacaacgctattattcagataccaacaaaactaattgatcattactactttaatttagctatcagtgccagctgtttatgtataccagatgttgtaaaataattctaacttaaaatgggaagatatacatgttgtgtaaaaaatccctgagctgccctactgaactaaataggtttcaacttctgttcatacggagaaagtatcagcaactttatgctcaattttgatacaaacatagcaatttagctatactaccgatcataaattaatgagcancccattntgaatg

SEQ ID NO: 58963 - DNA, 5471 bp, Homo Sapiens; identical to SEQ ID NO: 22279

SEQ ID NO: 58964 - DNA, 531 bp, Homo Sapiens
  misc_feature (422)..(422): n is a, c, g, or t
  misc_feature (458)..(458): n is a, c, g, or t
  misc_feature (484)..(484): n is a, c, g, or t
  misc_feature (496)..(496): n is a, c, g, or t
aaagactttaatcggcaatgattaatgtaagttttcttcctcctcccttcccttgaacacagcctcggcatcttctaagcttcagtgtttctatggctatcagagtacatatgcgagataaaacctattccacatcgctgggttaggctgtaacaagttctgggagatactgatgtaggattaagctacaactaggcattggaaacagccaattggtagctcttaagatcttggagagaatggaatcgattcctaatgtgggaacagcaaattctactccctaaaatgaaaggggctaatggaagccttatgataagagttcttcccaaatttcctcactagagcaaagtatttgtcttaggcatgtgtgtaattgttgcatgacagcatcaagatatcccatgtgggggctgtgtgagaanatccctatgcagggtgcgctcaatggttccccctgntgtgagagaattccccctccatttgncaacacagatgnccctcacagcacatgaagcctctcagatactaccc

SEQ ID NO: 58965 - DNA, 670 bp, Homo Sapiens
  misc_feature (670)..(670): n is a, c, g, or t
atttgtttccacctcataacctgttgcaataaatattacttctcatacagtttaatattgttgtttgttggagaaaatgaaccataaaaattgatttgctgttcagttttcaattattcaagtacacccaattaaagatgcagttatgtttataaaataagaagaaatagacttgttggctgtttttttctatttctgactctgccatgaattttttttttttttttaaagacaatatctcactctgttgcctaggctggagtgcagtggtgcaaccacagctcactgcaccttcaaatgctggagctcaagcaatcctcttacctccgcttcccaagcagctgggaccacagatggagttttgctcttgtcacccaggctggagtgtagtggtgcaatctcagctcactgcaacctctgtctcccaggttcaaatggttctcatgcctcagccttccgagtagcttgggttacagatgtatcctccacttctcgctgccaccattctgctgcccaacagaagaagctcttttgtcttcgaattccttgacggtctaagggaagcagtgggctaggcccatgctttggttcaaagcgtttggagaacatctccttgctccttttccggaacgagataatgacacagagtcctagacgtcatcctttgacn

SEQ ID NO: 58966 - DNA, 449 bp, Homo Sapiens
  misc_feature (55)..(55): n is a, c, g, or t
  misc_feature (78)..(78): n is a, c, g, or t
  misc_feature (116)..(116): n is a, c, g, or t
  misc_feature (153)..(153): n is a, c, g, or t
  misc_feature (172)..(172): n is a, c, g, or t
  misc_feature (355)..(355): n is a, c, g, or t
  misc_feature (425)..(425): n is a, c, g, or t
  misc_feature (443)..(443): n is a, c, g, or t
  misc_feature (449)..(449): n is a, c, g, or t
cgcacgagagtcagtccaccttaaacccctaaagatgccacccttaaagatacangtcctcagtattattgaaatacnggcatctgcaacacataccccctattatttctacctcnttaggaagacacctattccacagagactgatttatanggggcagcactttattttnttctggaaacccaagttctctttgactcctctttttgtccaaaagtgatctggtcggatctcacaaggccatccaatgagaccccgcacagcattttctaaagaagaatcgaagcctgaccactttcaccttgggcaagaaggtttggcctttgagttgctattctatggctggaagagcctngctttagaggagggagttaccagggagggagtccagccattttcagattctggaagttagacgataggantgtgggaagaacacatanatagtn

SEQ ID NO: 58967 - DNA, 2143 bp, Homo Sapiens
ggcacgaggctaagatggcggtggctgcggcggttggcgctgcgtagctgaggtcgaaaaggcggccactggggccgaggcagccaggaaacgtgtgggcctctctgctgcggtctccgagggccgaccgctgccggcggcgggtcgtgggggctgactgtcgctctgcctttgacaggagaggctgcttcttgtagaggaaacagctttgaagtgtggagcgggaaaggagcagtttctgagctgcaaaaactagtttctaaacagagagttaattgttaaatccagtatggccacaggaggaggtccctttgaagatggcatgaatgatcaggatttaccaaactggagtaatgagaatgttgatgacaggctcaacaatatggattggggtgcccaacagaagaaagcaaatagatcatcagaaaagaataagaaaaagtttggtgtagaaagtgataaaagagtaaccaatgatatttctccggagtcgtcaccaggagttggaaggcgaagaacaaagactccacatacgttcccacacagtagatacatgagtcagatgtctgtcccagagcaggcagaattagagaaactgaaacagcggataaacttcagtgatttagatcagagaagcattggaagtgattcccaaggtagagcaacagctgctaacaacaaacgtcagcttagtgaaaaccgaaagcccttcaactttttgcctatgcagattaatactaacaagagcaaagatgcatctacaagtcccccaaacagagaaacgattggatcagcacagtgtaaagagttgtttgcttctgctttaagtaatgacctcttgcaaaactgtcaggtgtctgaagaagatgggaggggagaacctgcaatggagagcagccagattgtaagcaggcttgttcaaattcgcgattatattactaaagctagttccatgcgggaagatcttgtagagaaaaatgagagatctgctaatgttgagcgccttactcatctaatagatcaccttaaagaacaagagaagtcatatatgaaatttcttaaaaaaatccttgctagagaaaatgaggaggaggatgttcggactatagattcagctgtgggatctggttctgtagctgagagcacatcgctaaacatagatgtgcagtctgaggcttcagataccacggccagagatcctcagcaggagcctatggaagagatagaaaatttgaagaaacaacatgatttattaaaaagaatgttacaacagcaggagcaactaagagctctacagggacggcaggctgcacttctagctctgcaacataaagcagagcaagctattgcagtgatggatgattctgttgttgcagaaactgcaggtagcttatctggcgtcagtatcacatctgaactaaatgaagaattgaatgacttaattcagcgttttcataatcagcttcgtgattctcagcctccagctgttccagacaatagaagacaggcagaaagtctttcattaactagggaggtttcccagagcaggaaaccatcagcttcagaacgtttacctgatgagaaagtcgaactttttagcaaaatgagagtgctacaggaaaagaaacaaaaaatggacaaattgcttggagaacttcatacacttcgagatcagcatcttaacaattcatcatcctctccacaaaggagtgtcgatcagagaagtacttcagctccctctgcttctgtaggcttggcaccggttgtcaatggagaatccaatagcctcacatcatctgttccttatcctactgcttctctagtatctcagaatgagagtgaaaacgaaggccacctcaatccatctgaaaaactccagtaaaacatttataatcattgtttacatgaagttaaataatagggataaattctgtttttttttttatgttgaaaattctgcaaaacgagatttatttaatattgttgtaaacattcttaagggataggtagaagaggcgtgtgtgtgttgtgtgggcataatttgagttgtctaagagatgtgatgtaacatagtttctgtgaactgatgttactttcttgtttttcaaataaaggatcaaaaaaaaaaaaaaaaaaaaaaaaa

SEQ ID NO: 58968 - DNA, 870 bp, Homo Sapiens
gtcaccttgtattacagcatgttatataagcacatacaggcacatacatgaaatagtgatacttcattctcagtaatattttcatccttctcactggaaagatctttgatgatttttaatcaacataggagtttcaatgatatctagaagtttaaaagggctcgttcaaacaaattatgaccacacacactgaagagtatgtttgtctcttgtggtgtaaatttttttttattacaccaaattatgttcacacaaaaccttgtaatcagggggaattaaagagccttcctggaaaatggaggttgcagtcagccgagatggtgccatcgcactctagcctggggaatagagtgagatcctgcctcaaaaaaaacaaaaaaattctttattttctccataaactacagtttatataagcaaaagtttcagtactaagcaattttagtctctgcagtctcttgtcttgaattaatacaactttgttaattctcttatgaagttaatcttcctgcttgtatgtgaattaaatatatgtcaaactttttttgtacaacagattcatacctctttcctgttttgaaattattttactgtgtttcatcaatctaatgtttatttttattacaccagtaatttcctcatgtgtgttgaatcttacagtggttataaatctacatgtacctagaaaatgtttagccagtccatgtatatttgatgtggcccattttttcctttggaatcacatactcttaagagaagtaattcttcttgtaactctattccttcgtggtgattaatctcttgatgaaataatcctttcatagtgaagacttaagattcggcggggggcagcgaccaaagaaagcaggg

SEQ ID NO: 58969 - DNA, 3565 bp, Homo Sapiens
tttttttgaatctgcggaggcggcggcggtggcagcggcggcgcggcgactgaagcgcgcgaaaagctgaggcggcaacgtcggggacggctgcgcgggacggctctgtaggaaggaacttggttccccctccctcagcttccgccccaaaagattcagaatggacagtttagaagaacctcagaaaaaagtctttaaggctcgaaaaacgatgagagtgagtgatcgtcagcaacttgaagcagtgtacaaggtcaaagaagaactgttgaaaactgatgtcaagctgttaaatggcaaccatgaaaatggagatttggacccaacctcacctttggaaaacatggattacattaaagacaaggaagaggtgaatggcattgaagagatttgttttgatcctgaaggaagtaaagcagaatggaaggaaacaccctgtatcctaagtgttaatgtaaaaaacaagcaggatgatgatttaaattgtgaacctttgtctccccataatataactccagaaccagtctctaaactgcctgctgaaccagtttctggtgatccagcccctggtgatctggatgccggagatccagcctccggagtactggcctctggtgattccacctctggtgatcccacctctagcgagccctcctctagtgatgctgcctctggtgatgcaacctctggtgatgccccttctggtgatgtgtcccctggtgatgccacctctggtgatgccactgctgatgatctctcctctggtgatcccacctctagtgatcccatcccaggtgaaccggtccctgttgaacccatttctggtgattgtgccgctgatgatatagcctctagtgaaataacttctgttgatctggcttctggagcaccagcttccactgatccagcctctgatgatctggcctctggtgatctatcctctagtgaactggcctctgatgatctggccactggtgaactggcctctgatgagctgacttctgaatcaacctttgatcgtacctttgaaccaaagtctgtaccagtttgtgaaccagttcctgaaattgacaatatagaaccaagtagcaataaagatgatgattttcttgaaaaaaatggagctgatgaaaaattagagcaaattcagagtaaagactcattggatgagaaaaataaagctgataataatattgatgctattgaagaaactctagaaacagatgatacaactatttgttcagatcgacctcctgaaaatgaaaagaaggtagaggaagatattatcacagagcttgctcttggagaagatgctatatctagcagtatggaaattgaccaaggtgaaaagaatgaagatgaaacttctgcagatcttgtagaaacgattaatgaaaatgttattgaagataacaaaagtgagaatatcttagaaaatacagactctatggagacagatgaaatcattcctattttggaaaagcttgcaccttctgaggatgaacttacttgcttttctaaaacatctctccttccaatcgatgagacaaatccagatttggaagagaaaatggaaagttcttttggttcaccatctaaacaagaaagtagtgagagtttgccaaaagaagcctttctggtcctctctgatgaagaggatatttcgggtgaaaaagatgagtctgaagttatatcgcaaaatgaaacgtgctctccagcagaagtagaaagtaatgaaaaggacagcaaacctgaggaagaagagcaagtaatacatgaagatgatgaaagaccttctgagaaaaatgaattttctagacgaaaacgttctaaatcagaagacatggacaatgtacagtctaaacgtcgtcgatatatggaagaagaatatgaggcagaatttcaagtaaagattacagccaaaggagacattaaccagaaacttcaaaaggttatacagtggttgctggaagaaaaattgtgtgcgctgcagtgtgctgtatttgataagactttggcagaattgaaaacacgagtggaaaagattgaatgtaacaagaggcataaaacagttctcactgaactacaggccaagatagccaggttaaccaaacgctttgaagcagccaaagaagatcttaagaaaagacatgaacatccacccaacccaccagtatcaccaggaaaaactgtaaatgatgtcaacagcaataataacatgtcttacagaaatgcaggcacagtgagacagatgctggagtccaagagaaatgtaagcgagagtgcaccaccatcctttcaaactcctgtgaatacagtatcttcaaccaatcttgtcactcctccagcagttgtcagtagtcaacctaaattgcagactccagtgacttcgggttccctcacagcaacgtcagttcttcctgcacccaatacagctactgtagttgctactactcaggtgcctagtggaaatccccagcctacaatctctttacagcctttgccagtgattttgcatgtacctgttgcagtatcctcccagcctcagcttctacagagccatccagggactttggtgactaatcaaccatctggcaatgttgaattcatttctgtgcaaagcccacctacagtgagtggtcttaccaaaaatccagtatccttgccatccttgccaaatcccactaaaccaaacaacgttccttctgtgcccagtcctagtattcaaaggaaccctactgccagtgctgcaccattgggaacaacacttgctgtgcaggctgttccaacagcacactctattgtacaagccacaaggacttctttacccacagtgggcccatcaggactctatagtccatcaactaatcgaggtcctatacagatgaaaattccaatttctgcatttagtacttcgtctgctgcagaacagaacagcaataccaccccaagaattgaaaaccagacaaacaaaacaatagatgcttctgtcagtaagaaagcagctgatagcacatcacagtgtggaaaagccactggcagtgattcaagtggtgtcattgatctcacaatggatgatgaagagagtggagcttcacaaggtacttcaatagtaattgtactaagcaacgttttgataccattttttttgtcttaatacggtacagtattctacaaagacagatgtttatggcattatgcttggtttatttgtgttctttttggaatggaagttttttagattagaattttaaaatttggccaggtgcagtgtctcacacctgtaatcccagtgctttgggaggccaaggcaggaggatcgaggcaagaggtcaggagtttgagaccagcccgggcaatgcggtgaaaccccgtctctataaaaaatttaaaaattagctgggtgtgatggcatgtgtctgtggtcccagctgcatgggaggctgaggcaggaggatagcttgagcctgggaggttgaggctgccgtgagctgtgtttatgccactgcattccatcctgggtgacagaatgaggccctgtctcaaaaaaaaaaaaaaaaaaaaa

SEQ ID NO: 58970 - DNA, 832 bp, Homo Sapiens
  misc_feature (168)..(168): n is a, c, g, or t
  misc_feature (485)..(485): n is a, c, g, or t
  misc_feature (491)..(491): n is a, c, g, or t
  misc_feature (496)..(496): n is a, c, g, or t
  misc_feature (503)..(503): n is a, c, g, or t
matgaaacccgcgaccgtgacaactctgctaaggaaaccaggatctcaaagaacagattcatgttttagggactttaaaagaagaaatccaagcagttatgcacatggacataatcctgaaaacccagtcaggggctgggtgcactgtcagtgaggagtttttctgtnctttgcagaaacatgaggttgaaagtgataatatagatatttggttttcagtcattcagaaattttcttcaaagaaaggcaatttgagctaaattaccatcattttcccttcttttgcaaatcaagaaatactaatccattgcatatgtgatccctcatataatttttagcccaaatggtcaaaattacaacttttaattttatgagctccaaattattaaacaccaacagttaattgtgtgcatgagaagaacaaagacaaatacaaaatatagaaactttttcttccagccacaaaaaacgaagttatgtctgtntggganatagnaacaatnactcaacaattagtgttaattcaagacctctgggaaagctgttgttggttataggctattatttaccttagaatatgaaagtttaaaggtcaaattttcaagttaaacttttcaagttaccttccccccaaaaaaagatttacatgtaggcttaaatttagaacagttaaagtataaatgttgaaaatttcaacttaattcagaatggtttcagaaagatatgatacaacaatttaagataacaatacagaagcgcatcacattttkggtttgagaatcacagaaggtacaacagtttttcttccttggggwtcttctctttctcttga

SEQ ID NO: 58971 - DNA, 4283 bp, Homo Sapiens
cccagctttgaaggtcttgcggtgaagcatcaagtgtacctgatttgtgaacctatcttgcttcagttggtttcctcctaaatattaggcagatgggattggctggtctgtgctctgctaggtgaaaaattagacgatttcaagaattggagctgaatctgatgttaagtaatggcaacaggtgacttaaaaagaagcttacggaacctagaacaggtgctccgcttgctaaattatcctgaagaggtggactgtgtaggtttgataaagggagacccagcagcatctttgcccatcatcagctattcttttacctcatactcaccttatgtaacagaacttataatggaatccaatgtagagctcatagcaaaaaatgacttgcgctttatagatgctgtctataagcttcttcgtgatcaatttaattataaaccaattttgacaaaaaagcagtttatccaatgtgggtttgcagaatggaaaatccaaattgtttgtgatattttgaattgtgtgatgaaaaagcacaaggaattaagcagtcttcagaagattccatcacaacaaagaaagaaaatcagttctggtaagtcagaacctcctttgagcaatgagaaaatatctgcagaggctgttggcgttgatatcagtggcaggtttatgacctcaggaaagaagaaagctgtggtgattcgtcacttgtataatgaagataatgttgacatttctgaggatacattaagtccaataacagatgttaatgaagcagttgatgtgtctgacttaaatgctactgaaataaagatgcctgaagtaaaggttcctgaaatcaaggctgagcaacaggatgtaaatgttaatcctgagattactgcactacaaactatgcttgctgaatgccaagaaaatcttaagaaactgacttcgatagagaaaaggttagactgtttggaacaaaaaatgaaaggaaaagtgatggtagatgaaaacacctggactaatcttcttagtcgtgtcactcttcttgaaacagaaatgcttttgtctaaaaagaatgatgaatttatagagtttaatgaagttagtgaagactacgcttcttgtagtgacatggaccttctgaatcctcacagaaaaagcgaagtagagaggccagcaagtattcctctgtcctctggctatagtacagcatcatcagattcaactcccagagcctctaccgttaattactgtggtttgaatgagatttcagaggaaacaacaatccagaaaatggaaaggatgaaaaaaatgtttgaagaaactgcagagttactgaaatgtccaaatcactacttgtaggattttctacatgaacttttttctaggactttggttactatacatattgtatattttaagaattctttatacaattttaatatactgcaatactgcagtttttgacaatttggattccatttggtatatgaatttttgcattcattattgaataactcttttaatatttttgagcaatgattatactgctttaccttgtgtcactttttttttttttaggaaaaactcatgttccagtatatttctcttacagagtgaagtcattacagcactgtatttctgtgttgacatttgttggcagtgtgctaagtaatgttttttaaagcacaggcttgaggactatggtttacatcctgttggaaacattccaaatgggacttgtgtattatacccaggaggctctcatatataccatcttggcatctgtactgatgaataagttataatgaacagttaaaaatgctcattgaaaattaaataaaacaaaaaggcagttatttcatgcttggtcaaaaacatcaatacctttccaattaacactgagaaattaaggttaagattctccttttgtactgggaaacaggctggaggactatggtcctcaagtttagaccaagaggactatggtctcaaggttcaccatgagaaatgtgttgaacattttagtatgctctattgtataatttttttggagggggggatggagtttcgctgttgttgcccaggctggagtgcaatagcaccatcttggctcaccgcaacctctgcctaccgggttcaagtaattcttgtgcctcagcctcctgagtagctgggattataggcatgcaccaccatgcccagctaattttgtatttttattagagacagggtttctccgtgttggtcaggctggtctcaaactcctgacctcaggtgatctgcctgtcttggcctccggcgtaacactttttaagaccagtgtaacagaaagagaatgtagccattctagccaccgttaaaagatacacagtgaggtgttgtgttttgtttttttaatgatgaaaagttacacattttttggagagaaaagtcttagctgaaggtaaatcaatggaaaaatgaaatttatttttaatattactatatgaattatctttttttaaacttgtagataaaagtgttccagtaatcagaaaatcctcaagaaaattgacttcattatttggaaggaaaattagtattttttttaatattatatggaccatctgattatattttatttattcatctatttatggtatgtatgtataattctatattacactgtcaaatataaaatattgttatatgagtagaaatcacttaaattttttttgtgtttgtgaatttgaaacagtgtaagaaatcacttttaagaaaacatttttagaattcctttgtttttttttttttctttttgaaacagggtctcactctgttgcccaggctggagtgcactggcgtgatctcggctcactgcaccttctgcctaccgagttcaagcgattcttgtgcttcagcctcctgagtagctgggactataggcctgtaccgtcatgcctggctaatttttgtatttttgtagagacagggtttcaccatgttgcccagtctgttctcaaactcgtgagctaaagctactcgcccacctggatgtcccaaagtgctagattccatgggtgagtcaccatgcttggccacatttttagtattctaataaacagttggtcatcagaactttaaaatggtagcctacagaaacatacaattttgaatttaacagagtttcagtaaatatttccagaattaatgaagcatgttagctttaattttttcaattgtgagagaagtacatttataaaaattaagaggttaagaggttatagttataagggaaaaaacttctgtatcgattaactcctaaaatatcagtaccagcatggaattatagcaccaccttgtggttaacatgccagtattttaccttttgttaaaacaagtgatttcccatcaaacaggataatattttttcccttttgaaaaattcaattttaaaaagaaacatttttgaagttttcttatggaagatagaaaaaaagttaagtctctttctaccctttctttttttctttatatagtgcagatatacacacagagaagggacttaaaacatttctaatctcctagtttatatacagtgtgcaaaatataagtaagtatatattgaaaatataaaatatttcatatatgttatcaggtggaaatttagaatccaaattttcttaaactttaataacttgtctaacaactctctaatagggactaaaaatcaactcaatatatcatacatttacacttacaaagagtctttagacaacataatttttggaaaaataaagcaaattcaactttattggagttattggacagatcagcaaattgttattttaaaaagttttcttgtttaggcaatttggtaagtggtttctagttataaactagccactgttgattaacttgagaaggtgaagcaggggagttctgaagagattacctagagctacttaaccctaagttaagtaaaattttcactttcattcttttcattctctcataaactggttgaaaaaacactgtactaccaacaaaggtgtcagttgcttgtgctgccctgtctatgttatgctctgaataggtctcggtaaagattatatggaaatactataaagaatacataaggtaaaatactagtcagaaagggttcagaagaagttagcatcaactgtatgaaaattctaggtaaagctaagtactattgagttggaaaaaagtaattctatcatgtttgcttgttttcctctactgtttttaatgtgatgttgtaatatattttaaaaataaaacttgaaaacgttggg

SEQ ID NO: 58972 - DNA, 3878 bp, Homo Sapiens
ccttaacttctgagctcacctattgtctttgggaagaagcagaaggaataatcccataactaccctctgggcttcatttttcattctcctccctcaaagtaatttctggacagaaactcacacgactatttacatcaaatcagatattaacaagtgaatgcttgagttgccttgtagagctacttgaagaccccaacataagtgcttcactgatcttaagtattatcggtttgctgtctcaactagcagtagacattgaaaccagagattgtcttcagaatacatataatctgaatagtgtgctggcgggagtggtttgtcggagcagccacactgattcggtgtttttgcagtgcattcaacttctacagaagttaacatataatgtcaaaattttctattctggtgccaatatagatgaattaattacgttcctgatagatcacattcaatcttctgaagatgagttaaaaatgccttgtctaggattattggcaaatctttgtcggcacaatctttctgttcaaacgcacataaagacattgagtaatgtgaaatctttttatcgaactcttatcaccttgttggcccatagtagtttaactgtggttgtgtttgcactttcaatattatccagtttgacattaaatgaagaggtgggggaaaagctattccatgctcgaaacattcatcagacttttcaactaatatttaatattctcataaacggtgatggcactctaactagaaagtattcagttgacctactgatggatctccttaagaatcctaaaattgctgattatctcaccagatatgagcacttttcttcatgtcttcaccaagtattaggtcttcttaatggaaaggatcctgattcctcttcaaaggttttagaattacttcttgccttctgttcagtgactcagctgcgccatatgctcactcagatgatgtttgaacagtctccacctggcagcgccactctgggaagccatactaaatgtttagaacctactgtggctctactgcgctggttaagccaacctttggacggatcagaaaactgttctgttttagcattggagttgttcaaggaaatatttgaggatgtcatagatgctgctaactgttcctcggctgatcgttttgtgacccttctgctgcctacaatccttgatcaacttcagttcacagaacaaaatctagatgaggctttaacaagaaaaaaatgtgaaaggattgccaaggccattgaagttttgttaactctctgtggagatgatacactaaaaatgcatattgcaaaaatcttgacaactgtcaagtgtaccactcttatagaacaacaatttacatatggcaagattgacctgggatttggaacaaaggttgcagattctgaattatgcaaacttgctgctgatgtaattttgaaaactcttgatttgattaacaaacttaaaccattggttcctggtatggaagtaagcttctacaaaatacttcaggacccacgtttgattactcctttggcttttgctttaacgtcagataatagagaacaagtacagtctggactgagaatattattggaggctgctccactgccagattttcctgctttagtacttggagaaagtatagcagcaaacaatgcctatagacaacaggaaacagaacatatacccagaaaaatgccctggcaatcatcaaatcacagttttccaacatcaataaagtgtttaactcctcatttgaaagatggtgttcctggattgaatattgaagaattaatagagaaacttcagtctggaatggtggtaaaggatcagatttgtgatgtgagaatatctgacataatggatgtatatgaaatgaaactatccacattagcttccaaagaaagcaggctacaagatcttttggaaacaaaagctctagcccttgcacaggctgatagactgattgctcagcatcgctgtcaaagaactcaagctgaaacagaggcacggacacttgctagtatgttgagagaagttgagagaaaaaatgaagagcttagtgtgttgctgaaggcgcagcaagttgaatcagaaagagcgcagagtgatattgagcatctctttcaacataataggaagttagagtctgtggctgaagaacatgaaatactgacaaaatcctacatggaacttcttcagagaaatgaaagtactgaaaagaagaataaagatttacagatcacatgtgattctctgaataaacaaattgagacagtgaaaaagttgaatgagtcactcaaggaacaaaatgaaaaaagtattgcccaattaatagagaaagaagaacagagaaaagaagtacagaatcagctagtagacagagaacataagctagcaaatttgcatcaaaaaacaaaagtacaagaagaaaagattaaaaccttacaaaaggaaagggaagataaggaagaaaccattgatatccttagaaaagaattaagcagaacagaacagataagaaaagagttgagcattaaggcttcctccctagaggttcaaaaggcacaattagaaggtcgtttggaagagaaagagtccttggtgaaacttcagcaagaggaattgaacaaacactcccacatgatagcaatgatccacagtttaagtggtggaaaaataaatccagaaactgtgaatctcagtatatagacattatggcattttggaatttgtaatctcatgatatttttgatgtatttatctattggagggggggtgggtaggggagttaatttgtgacttcgtaacaataagaagttattatctaatttagtaaagaccctgatctgttgcatgtttttttatttgatagtttgaatagaaatttaattttctaagttttactttttgtttctggcttttatggcttaaggttttctttggttcttacattagaaaatcatttttaacctccattatcatttttctaaggttctttcctttttcttagttgctttctattctgttttgcctgtcttatttattctcatttgtgattatttagatcttaagaccaaactttcttggtataacagtcctaaagattacaaaataaaaatatagagagagtaaaagtaaaaagtaaagtaaaaagagagaaggtatgattttactgctagagaagtttgtctctgaagaagcacaaaagaaaatattagtgaatttaaaataatttttatactgctgtagcataatttctaaatttgaaaaaaatgcaatggtaataaaatgtataaaaattagaaaactgtcattgtgttaaactattacatttaaatgattacatttaacacaatagctgtctcataaaaaatctaagaacttgtagaattatttgtaaggtatatttagtgtttttttctcttttttcaaatgttgcatagtggtccagatcatctataattaattataagtttcttatgatttacataaggataatttggattctactcttgctgcatattcagaaaaatattatttactgttaattctgatatgaattgtatttaatttgttgtcctaatagtttttaattggttcatttaattttaaagcataggttaaatatctttattttttttaaaatacaagggtccttctgtacttttcatttgaatcatatcctctaactactctgtaagaaacgtttttacatcaatattttgattgattttattgctataccaatacagtcattaattttacttggtgttttcttcaccatatgtctgtttgatttaagtgaatttagatttgtacagttctggaaattttttaaaaaatattatgcagagtaaaacattttaaattact

SEQ ID NO: 58973 - DNA, 346 bp, Homo Sapiens
  misc_feature (3)..(3): n is a, c, g, or t
  misc_feature (262)..(262): n is a, c, g, or t
  misc_feature (319)..(319): n is a, c, g, or t
  misc_feature (332)..(332): n is a, c, g, or t
cantctccacatcactcattatgaccccttcttttataatgcttatatcttttcattaaagattacatttaaggttttataaatattgtctgttcctgaagaggaacaccactgttccaccttcattctcccttctaataactgtatatgaaggaaattctgataatgtaactgggaagcagtaattcatttcattccataccggggtcattactgtattactgtttcacttttgtccacatcatatggctatggtatggcnggaacaaaggtctttaggtactatggcccctctttctatttctggaaggggaggganaatatatattttnccttgggatattcc

SEQ ID NO: 58974 - DNA, 559 bp, Homo Sapiens
  misc_feature (170)..(170): n is a, c, g, or t
  misc_feature (245)..(245): n is a, c, g, or t
  misc_feature (286)..(286): n is a, c, g, or t
  misc_feature (335)..(335): n is a, c, g, or t
  misc_feature (439)..(439): n is a, c, g, or t
  misc_feature (492)..(492): n is a, c, g, or t
  misc_feature (511)..(511): n is a, c, g, or t
  misc_feature (536)..(537): n is a, c, g, or t
  misc_feature (553)..(553): n is a, c, g, or t
cagagatggagtcttgcactgttgcctaggctggagtacagtagtgcattcttggctcactgcaacctccacctcccaggctcaagagattctcccgcctcagcctcccgagcagccgggactacaggcgcctgccaccacgcccagccaattttttgcatcttcagtanagacagggcttcaccatgttggccaggctggtctcgaactcctgacctcatgattcacccacctcagcctcccanagtgctgggaccacaggcgtgagccaccgtgcccggccaanatgaacattttttaaaaccaatttttcaggtataacataagatttctanccaaaggaaaattttgttgtattaattccaacatttgctgtgatttggtattatgtggtatttcttttgtgctctaaccaaaatcatgctagatttagatgccnataaatgcccaatttgaattgaaaacatcttttacctcccaataattatgccntaaaattgaatgaaccccncccataaccaaaatccccttctttnnatttttaattaatttnaaattt

SEQ ID NO: 58975 - DNA, 2425 bp, Homo Sapiens; identical to SEQ ID NO: 24061

SEQ ID NO: 58976 - DNA, 2710 bp, Homo Sapiens
aagaaggaaaatggacaatcatttctgcacatatagggtttaataaaacatgtataataaaatatctcatattttaaatttccaccttattggtagctttcatgacaaagggctagggtgctgatggccatacaattaaggtttttggttagttagttagcagaactaactggctcctacctggtgggtttttcttttgtttggttggttggttggttggttttttcccagatggctcaggaggaaggtaaatagcagtcattgtatgtgtgacagagtttgagatagaatgagcatattgaatctcacatcctattcttattactgtcaggcagcgttgacctagcagtataaaactatctgaagcaatgtagtcactcagttctcataaagtttatttcaagtactgtaacaattcatgtttggattagaaaagtcactagaaatttgacttccatatagtaatctatacttttttctctcatttccttcattttttgagccgtaagtgtaaggcattttgctggtattattacaatggttatgaggagtttctttgcttgcccaaggtcacatagctagcaagttaaagtagattcaaatccaggcctgctagataccaaattattatttaagagtacttttcactactcctaaataatgacacagatacgtttgtcttacacatttcactttattgtcaagttattagtatgtttattttcaaaagttattttttgcaatttctttttattattccgtactttttaaatttacttcattatcacgtcttcctttattctttttaaatagtttttgcttttgttattttgttttcccttttttactcttggtttgtaatacctctttccttatttgctcctttctcatttgatctcaatgttaatccaactgttttccacatctgattcactaaaattttagcccttaaaaaaaaaattcctgtttttcctatctccttttgtccattctcttctccttgcctcacttcttttatctttttccattttactttcattttttgtttctctagatgttgttttgacatatgagttaatgtactggtacaattttgcatctgtaaattagagcttcagaatcaactgagtgtatttattctttatttttaggcctaaatttatcttaccttttattgattttataatatactatactctttcattttagtctgcatatgttagccaaagaagatatgcccctgttttaagaaatctctgtaaaaaatgtcaagtgtgacaagaattcttcaagaaacaagctcctctagtttgtcttctatatttagagcttcaacagttacctatattactggtaactcccaaatataccttcaaacttgttttttgggcccaagttttttgcttcatatatatctgttttgaatatcccataaataattgcatctaaagcatacctccactccattgttctcaaagataaaaccaaacctgtgctgcttcttatatttctagtatttaagcgtcacctgccacccctttacctgagctacaagtcacgcattgcattagactcctctgctttcttctttcacctctaactagactattaaccaaaaattttttaatataactttcaaaaggtattttattacatcatttccatcctttatgtttgggttcaagccctcattaactttaacatggattcttggagtaccctccttactgattttgttacacatgtccctcttttagtcagtactaccatgataataccatggataataattttttcatttttatttttagtcttgctctgtcgccgaggctagagtgcagtggcgcgatctcagctcactgcaacctccacctcccgggttcaagtgattctcctgcctcagcctactgagtagctgggattacaggcacctgccacagctcctggctaatttttgtatttttagtagagatggagtttcaccgtcttgaactcctgacctcatgatccaccctcctcggcctcccaaagtgctgggattacaggcatgggccactgcgcccggccaataatttttgtgtgtgtgtgtgctaatcatactacattttctttagaataaaagatcacatacttgtttgccattcgcagtctggccccattgtgccattctagacttacctcctgccactccccaccagctttgttttgtcttagccacacaaaataatctagcgtctctaaccagtcaaacattttaccttgtgccttggctcactctgtgccttttctccagaatatctttctgtgtacttttctcccatccttttacctttaaacctgctgctatggtttgcatgttgtttggcccctccaaaactcatgttgtagttcaattgccaatgtaatagtgttgggagatggtacttttaagaggtaattaggttgctaagatggattaacatctttctcttgacactgagactgggttctcctgggaatggttagttcccaagagagtgagttgttataaaacaatgctgcctcttctattttgcgctttttgtttgcacaaactcggtccccttctgtttctctacgatgttttgatgcagcatgaggcagtcatgagaacccaccagatacagctgcctgatcctgaatttcccagccaacagaaccaagtgctaaataaaactctttttaataagtt

SEQ ID NO: 58977 - DNA, 447 bp, Homo Sapiens
aataaagttaaatattttaatgattttttttttaaaaaagtcttgatctgtgagttcctacagggtctgttttggctttgttaccatatttttacagtaacaaatcaaagcattattcattctttctttgcatccatttcttttccctcactaaaaaatgctcttcaaggaagacaagaggaaagaaacaaaaatgcagtatgcgttttgaagtacttgattttcaaagtgtagatgctgcataatagtttattaacaaagctcaaagtttacagaaataacattaaatgcaacactttttgattattaacacatgtacaattttacactgcaaaacaattgcaactaaaagtttaggaggtaaagaattagcacacttggaagtctgtatacatttaatacaaatttgcaagatatcagaatgatctctcctgaaaattcaacttt

SEQ ID NO: 58978 - DNA, 5654 bp, Homo Sapiens; identical to SEQ ID NO: 22454

SEQ ID NO: 58979 - DNA, 7482 bp, Homo Sapiens
cccgccatgggcttcctgcaccagctgcagctgctgctctggaagaacgtgacgctcaaacgccggagcccgtgggtcctggccttcgagatcttcatccccctggtgctgttctttatcctgctggggctgcgacagaagaagcccaccatctccgtgaaggaagtccccttctacacagcggcgcccctgacgtctgccggcatcctgcctgtcatgcaatcgctgtgcccggacggccagcgagacgagttcggcttcctgcagtacgccaactccacggtcacgcagctgcttgagcgcctggaccgcgtggtggaggaaggcaacctgtttgacccagcgcggcccagcctgggctcagagctcgaggccctacgccagcatctggaggccctcagtgcgggcccgggcacctcggggagccacctggacagatccacagtgtcttccttctctctggactcggtggccagaaacccgcaggagctctggcgtttcctgacgcaaaacttgtcgctgcccaatagcacggcccaagcactcttggccgcccgtgtggacccgcccgaggtctaccacctgctctttggtccctcatctgccctggattcacagtctggcctccacaagggtcaggagccctggagccgcctagggggcaatcccctgttccggatggaggagctgctgctggctcctgccctcctggagcagctcacctgcacgccgggctcgggggagctgggccggatcctcactgtgcctgagagtcagaagggagccctgcagggctaccgggatgctgtctgcagtgggcaggctgctgcgcgtgccaggcgcttctctgggctgtctgctgagctccggaaccagctggacgtggccaaggtctcccagcagctgggcctggatgcccccaacggctcggactcctcgccacaggcgccacccccacggaggctgcaggcgcttctgggggacctgctggatgcccagaaggttctgcaggatgtggatgtcctgtcggccctggccctgctactgccccagggtgcctgcactggccggacccccggacccccagccagtggtgcgggtggggcggccaatggcactggggcaggggcagtcatgggccccaacgccaccgctgaggagggcgcaccctctgctgcagcactggccaccccggacacgctgcagggccagtgctcagccttcgtacagctctgggccggcctgcagcccatcttgtgtggcaacaaccgcaccattgaacccgaggcgctgcggcggggcaacatgagctccctgggcttcacgagcaaggagcagcggaacctgggcctcctcgtgcacctcatgaccagcaaccccaaaatcctgtacgcgcctgcgggctctgaggtcgaccgcgtcatcctcaaggccaacgagacttttgcttttgtgggcaacgtgactcactatgcccaggtctggctcaacatctcggcggagatccgcagcttcctggagcagggcaggctgcagcaacacctgcgctggctgcagcagtatgtagcagagctgcggctgcaccccgaggcactgaacctgtcactggatgagctgccgccggccctgagacaggacaacttctcgctgcccagtggcatggccctcctgcagcagctggataccattgacaacgcggcctgcggctggatccagttcatgtccaaggtgagcgtggacatcttcaagggcttccccgacgaggagagcattgtcaactacaccctcaaccaggcctaccaggacaacgtcactgtttttgccagtgtgatcttccagacccggaaggacggctcgctcccgcctcacgtgcactacaagatccgccagaactccagcttcaccgagaaaaccaacgagatccgccgcgcctactggcggcctgggcccaatactggcggccgcttctacttcctctacggcttcgtctggatccaggacatgatggagcgcgccatcatcgacacttttgtggggcacgacgtggtggagccaggcagctacgtgcagatgttcccctacccctgctacacacgcgatgacttcctgtttgtcattgagcacatgatgccgctgtgcatggtgatctcctgggtctactccgtggccatgaccatccagcacatcgtggcggagaaggagcaccggctcaaggaggtgatgaagaccatgggcctgaacaacgcggtgcactgggtggcctggttcatcaccggctttgtgcagctgtccatctccgtgacagcactcaccgccatcctgaagtacggccaggtgcttatgcacagccacgtggtcatcatctggctcttcctggcagtctacgcggtggccaccatcatgttctgcttcctggtgtctgtgctgtactccaaggccaagctggcctcggcctgcggtggcatcatctacttcctgagctacgtgccctacatgtacgtggcgatccgagaggaggtggcgcatgataagatcacggccttcgagaagtgcatcgcgtccctcatgtccacgacggcctttggtctgggctctaagtacttcgcgctgtatgaggtggccggcgtgggcatccagtggcacaccttcagccagtccccggtggagggggacgacttcaacttgctcctggctgtcaccatgctgatggtggacgccgtggtctatggcatcctcacgtggtacattgaggctgtgcacccaggcatgtacgggctgccccggccctggtacttcccactgcagaagtcctactggctgggcagtgggcggacagaagcctgggagtggagctggccgtgggcacgcaccccccgcctcagtgtcatggaggaggaccaggcctgtgccatggagagccggcgctttgaggagacccgtggcatggaggaggagcccacccacctgcctctggttgtctgcgtggacaaactcaccaaggtctacaaggacgacaagaagctggccctgaacaagctgagcctgaacctctacgagaaccaggtggtctccttcttgggccacaacggggcgggcaagaccaccaccatgtccatcctgaccggcctgttccctccaacgtcgggttccgccaccatctacgggcacgacatccgcacggagatggatgagatccgcaagaacctgggcatgtgcccgcagcacaatgtgctctttgaccggctcacggtggaggaacacctctggttctactcacggctcaagagcatggctcaggaggagatccgcagagagatggacaagatgatcgaggacctggagctctccaacaaacggcactcactggtgcagacattgtcgggtggcatgaagcgcaagctgtccgtggccatcgccttcgtgggcggctctcgcgccatcatcctggacgagcccacggcgggcgtggacccctacgcgcgccgcgccatctgggacctcatcctgaagtacaagccaggccgcaccatccttctgtccacccaccacatggatgaggctgacctgcttggggaccgcattgccatcatctcccatgggaagctcaagtgctgcggctccccgctcttcctcaagggcacctatggcgacgggtaccgcctcacgctggtcaagcggcccgccgagccggggggcccccaagagccagggctggcatccagccccccaggtcgggccccgctgagcagctgctccgagctccaggtgtcccagttcatccgcaagcatgtggcctcctgcctgctggtctcagacacaagcacggagctctcctacatcctgcccagcgaggccgccaagaagggggctttcgagcgcctcttccagcacctggagcgcagcctggatgcactgcacctcagcagcttcgggctgatggacacgaccctggaggaagtgttcctcaaggtgtcggaggaggatcagtcgctggagaacagtgaggccgatgtgaaggagtccaggaaggatgtgctccctggggcggagggcccggcgtctggggagggtcacgctggcaatctggcccggtgctcggagctgacccagtcgcaggcatcgctgcagtcggcgtcatctgtgggctctgcccgtggcgacgagggagctggctacaccgacgtctatggcgactaccgccccctctttgataacccacaggacccagacaatgtcagcctgcaagaggtggaggcagaggccctgtcgagggtcggccagggcagccgcaagctggacggcgggtggctgaaggtgcgccagttccacgggctgctggtcaaacgcttccactgcgcccgccgcaactccaaggcactcttctcccagatcttgctgccagccttcttcgtctgcgtggccatgaccgtggccctgtccgtcccggagattggtgatctgcccccgctggtcctgtcaccttcccagtaccacaactacacccagccccgtggcaatttcatcccctacgccaacgaggagcgccgcgagtaccggctgcggctatcgcccgacgccagcccccagcagctcgtgagcacgttccggctgccgtcgggggtgggtgccacctgcgtgctcaagtctcccgccaacggctcgctggggcccacgttgaacctgagcagcggggagtcgcgcctgctggcggctcggttcttcgacagcatgtgtctggagtccttcacacaggggctgccactgtccaatttcgtgccacccccaccctcgcccgccccatctgactcgccagcgtccccggatgaggacctgcaggcctggaacgtctccctgccgcccaccgctgggccagaaatgtggacgtcggcaccctccctgccgcgcctggtacgggagcccgtccgctgcacctgctctgcgcagggcaccggcttctcctgccccagcagtgtgggcgggcacccgccccagatgcgggtggtcacaggcgacatcctgaccgacatcaccggccacaatgtctctgagtacctgctcttcacctccgaccgcttccgactgcaccggtatggggccatcacctttggaaacgtcctgaagtccatcccagcctcatttggcaccagggccccacccatggtgcggaagatcgcggtgcgcagggctgcccaggttttctacaacaacaagggctatcacagcatgcccacctacctcaacagcctcaacaacgccatcctgcgtgccaacctgcccaagagcaagggcaacccggcggcttacggcatcaccgtcaccaaccaccccatgaataagaccagcgccagcctctccctggattacctgctgcagggcacggatgtcgtcatcgccatcttcatcatcgtggccatgtccttcgtgccggccagcttcgttgtcttcctcgtggccgagaagtccaccaaggccaagcatctgcagtttgtcagcggctgcaaccccatcatctactggctggcgaactacgtgtgggacatgctcaactacctggtccccgctacctgctgtgtcatcatcctgtttgtgttcgacctgccggcctacacgtcgcccaccaacttccctgccgtcctctccctcttcctgctctatgggtggtccatcacgcccatcatgtacccggcctccttctggttcgaggtccccagctccgcctacgtgttcctcattgtcatcaatctcttcatcggcatcaccgccaccgtggccaccttcctgctacagctcttcgagcacgacaaggacctgaaggttgtcaacagttacctgaaaagctgcttcctcattttccccaactacaacctgggccacgggctcatggagatggcctacaacgagtacatcaacgagtactacgccaagattggccagtttgacaagatgaagtccccgttcgagtgggacattgtcacccgcggactggtggccatggcggttgagggcgtcgtgggcttcctcctgaccatcatgtgccagtacaacttcctgcggcggccacagcgcatgcctgtgtctaccaagcctgtggaggatgatgtggacgtggccagtgagcggcagcgagtgctccggggagacgccgacaatgacatggtcaagattgagaacctgaccaaggtctacaagtcccggaagattggccgtatcctggccgttgaccgcctgtgcctgggtgtgcgtcctggcgagtgcttcgggctcctgggcgtcaacggtgcgggcaagaccagcaccttcaagatgctgaccggcgacgagagcacgacggggggcgaggccttcgtcaatggacacagcgtgctgaaggagctgctccaggtgcagcagagcctcggctactgcccgcagtgtgacgcgctgttcgacgagctcacggcccgggagcacctgcagctgtacacgcggctgcgtgggatctcctggaaggacgaggcccgggtggtgaagtgggctctggagaagctggagctgaccaagtacgcagacaagccggctggcacctacagcggcggcaacaagcggaagctctccacggccatcgccctcattgggtacccagccttcatcttcctggacgagcccaccacaggcatggaccccaaggcccggcgcttcctctggaacctcatcctcgacctcatcaagacagggcgttcagtggtgctgacatcacacagcatggaggagtgcgaggcgctgtgcacgcggctggccatcatggtgaacggtcgcctgcggtgcctgggcagcatccagcacctgaagaaccggtttggagatggctacatgatcacggtgcggaccaagagcagccagagtgtgaaggacgtggtgcggttcttcaaccgcaacttcccggaagccatgctcaaggagcggcaccacacaaaggtgcagtaccagctcaagtcggagcacatctcgctggcccaggtgttcagcaagatggagcaggtgtctggcgtgctgggcatcgaggactactcggtcagccagaccacactggacaatgtgttcgtgaactttgccaagaagcagagtgacaacctggagcagcaggagacggagccgccatccgcactgcagtcccctctcggctgcttgctcagcctgctccggccccggtctgcccccacggagctccgggcacttgtggcagacgagcccgaggacctggacacggaggacgagggcctcatcagcttcgaggaggagcgggcccagctgtccttcaacacggacacgctctgctgaccacccagagctgggccagggaggacacgctccactgaccacccagagctgggccagggactcaacaatggggacagaagtcccccagtgcctgccagggcctggagtggaggttcaggaccaaggggcttctggtcctccagcccctgtactcggccatgccct

SEQ ID NO: 58980 - DNA, 1893 bp, Homo Sapiens
attttggccggtacaccgccggaagtgtggaggtgtggctgcccgaggcggtagagcggagaaagcctattttcttttcgtttagatacattaccttttgcctaggctggcgtcgagacttgaggccgttgcagactttggcgcggctcgcgcctcctgcttcaagagcccagcggtgagagctggcctgcggcacgcggcctaatgccagacagtaacagtttggaggatcaagatgttgaccaacttgaggatatttgcaatgagtcatcagacaatacccagtgtgtatattaataatatatgctgctataaaataagagcaagtttaaaaagattaaagccacatgtgccgcttggaagaaattgcagttctctaccaggcttaataggaaatgatatcaaatcccttcattccatcatcaatcctcccatagctaaaatccgtaatattggaattatggctcatattgatgcaggcaaaactaccaccacagaaagaatattgtactattccggatatacaagatcactgggagatgttgatgatggagacacagtgacagatttcatggcccaagagcgagaaagaggcattactattcaatcagctgctgttacatttgattggaaaggttatagagtcaatctaattgatacaccaggtcatgtggactttaccttggaggttgaacggtgcctaagagtgttggatggtgcagtggctgtatttgatgcctctgctggtgtagaggcccagactctcacagtatggaggcaagctgataaacacaatatacctcgaatctgttttttaaacaagatggacaaaactggagcaagctttaagtatgcagttgaaagcatcagagagaagttaaaggcaaagcctttgcttttacagttaccaattggtgaagccaaaactttcaaaggagtggtggatgtagtaatgaaagaaaaacttctttggaattgcaattcaaatgatggaaaagactttgagagaaagcccctcttggaaatgaatgatcctgaattgctgaaggaaacaactgaagcaaggaatgccttaattgaacaagttgcagatttggatgatgaatttgctgacttggttttagaagaatttagtgagaattttgatttgttaccagctgaaaagctacagactgcaatacatagagtgacactagctcagacagcagtgcctgtgctttgtggaagtgccctgaaaaacaaagggatacagcccttgttagatgctgttactatgtacttaccttcacctgaagagcgtaactatgaatttctgcagtggtataaggatgacttatgtgcattggcatttaaagttctccatgacaagcagcgaggaccactggtttttatgcgcatttactcaggcactataaaaccccagttggccattcataatattaatggaaactgcacggagagaataagtcgtctgcttttgccgtttgctgaccaacatgtagaaatcccttcattgactgctggtaacattgctttgactgttgggcttaaacatactgccactggagacaccattgtctcatccaagtccagtgcattagctgcagctcgtagagccgaacgggagggagaaaagaagcacagacaaaacaatgaagcagagagacttttattggctggagtggagattccagaacctgttttcttctgtaccatagaacccccatcactgtctaagcagccaggtataaatggtcttagtgtgtcaactaattagtgcgctgataatttatataaaatagttgcaatataccctcaagagatttcttatgtgattgaggtaaattttatctgaatatattggtaaacattaaaaaaaaaaaaaaaaaaaaa

SEQ ID NO: 58981 - DNA, 1521 bp, Homo Sapiens
  misc_feature (1309)..(1309): n is a, c, g, or t
  misc_feature (1442)..(1442): n is a, c, g, or t
ttaattaagtttgtaggtttaaactgttaacttacggtgtatttaggcaatttaaattgggttatgtatctagatatagaaaaacttactgcattttgcccagtatctaatttacactaatacatttatgctgaaacctgtaccttaaaacatttttaaataggtatattgagatcttcagaagtagcaggagtgaaatcaaaggattttatgatccaccaagaagattgctgggacagcgaccgggaccatatgatagaccaataggaggaagagggggttattatggagctgggcgtggaagtatgtatgacagaatgcgacgaggaggtgatggatatgatggtggttatggaggttttgatgactatggtggctataataattacggctatgggaatgatggctttgatgacagaatgagagatggaagaggtatgggaggacatggctatggtggagctggtgatgcaagttcaggttttcatggtggtcatttcgtacatatgagagggttgccttttcgtgcaactgaaaatgacattgctaatttcttctcaccactaaatccaatacgagttcatattgatattggagctgatggcagagccacaggagaagcagatgtagagtttgtgacacatgaagatgcagtagctgccatgtctaaagataaaaataacatgcgtaagtggtgtctttggcacacaatcttatttcctaaacgtgaatttataaaataagaggctctaagatctgtaggtaacgcttggcagttgttgggatttaaaaccatttgacctctataatggctttctgtgggctttatatatcgctgtactagtaattaataagcatactttgtttaatattacttaattgatcttttttacaaagcttgtattgatgaattttatccatcattcctttctcccctgttactctttctttttttcttaaagaacatcgatatattgaactcttcttgaattctactcctggaggcggctctggcatgggaggttctggaatgggaggctacggaagagatggaatgggtatgtaaagtttttaaaatatgcagggttagctgcttatcgatgagtctcaattttttttcttttttctttttaaagataatcagggaggctatggatcagttggaagaatgggaatggggaacaattacagtggaggatatggtactcctgatggtttgggtggttatggccgtggtggtggaggcagtggaggttactatgggcaaggcggcatgagtggaggtggatggcgtgggatgtactgaaancaaaaacaccaacatacaagtcttgacaacagcatctggtctactagactttcttacagatttaatttcttttgtattttaagaactttataatgactgaaggaatgtgttttcaaaatattatttggtaaancaacagattgtgatgggaaaatgttttctgtaggtttatttgttgcatactttgacttaaaaataaatttttatattca

SEQ ID NO: 58982 - DNA, 2106 bp, Homo Sapiens
tgatgattgaagtatgtttattgtaagggcagaaatgtgttggcatttggataaaaaactgctaacattatagaacttattacctaacaaaatttcacaccacaaaaaatattttaatggcaaattcaaggtgttttattgcttacaaatcagcatctttgactctttgaacatcaatttgtgtttacattgaaatgacaaaaagacaaactaagaagaaatacagcatgcaagttggaattcagagttaaaaccatgatgttgccgctcagccagctatgtgactgttgaccctttcaagaacacacatggatttaaaagttggatgacatccattgttggggccttgggggatatggtaaagcatgaaaactaaacagccaggagcctgtgaaatctgctactgtattttccaggacttcattccactccttggctaaaaaaatcttggaagtttcacagattatgatgtggacctgtcacctgtaaattgtctcaatctactcagacaagacactaaactgtctttggatactatagatgtcagtgcttatagcagctggaatttggctagtgacaatgtttaaagatgtaatactagttagtatctattgaagcttaaactttgctggtcaggttgtagctattgtaaaagtatttattgaagaagctcacagtccttcagttgtacagactgaaaaactttcatgaaagatccaacatactaatgtaaattatatttattacaatgtatgatattaatgtgtcaaactggtgtattttacaaaatatataatgcatacataaataagagttgtatattacagtgcttttcaaatatcagtgtcttggaatatttaagtcttcacattttttggtctaaaatatgaaaatgtttcatgatacaagtgattaattttccctagtagtgcttttgcatgtttgcctttttatttaagtttttttctatatagacacaatttggtgtcagactatcataagatcgatagtgaatataaaatatcttagccaaatggggtctgtattgtctacattttatatattaaataaaagtttttgttgtcttttcaggaggtttagagtattgtcactaaatatgatcaaagcttccctttccaaatgcaaaagtcttgtcctacatttaaagttgatctgtcatgttttagcagtcaagtgggatgggcattatataaacaacgttacaatgtaaggaaaatctttaaggagatggggagagaaaaaggcagctggtataatcggttactgctgcttagttctacttaattttttgtgttgcttcttcttaaggtgagatagcataatcttaactgttttgagatggaattttaaagtaacacactaccagcgagttcaacactgctattgattttaatctgttttttttttgtttagttgataacttaaattccaagtttcatagtgataattgtatattatttggctgctgaattctgttagagttttttattctgttgtacattgtattatacacataatcacaaattaatatgaaggtgaatatatgttacatatcaaaatttgtgaatttgaattatagtatgttttagtgctattgcaaaaaatgtttatttttatattatctgtgattttaatatagatgattgaactagatttctttttgagtgatagtgccattgaatgagcagtatggaaacagtgttacttgatattttgagctttctcaggtttatctaaatcagtggtagcttaacaaaacccagactaattgtgtgtaattgtatttttaataaaaggaaagtacatttcctataatagcatagtactgtttgcatgtaagagtatgcaaaaccttgtgtgtgtgtgtgtgtgtgtgtgtgtgtgtgtgtcttagtgtgtgtaaggcatggcagccaactttgtatctgctatttttagtacgagcagagcttcataattgtggtcactagaactgtacttaccatggacagttaaaactgaaaaagactcaataaaactatgaaacatggaaaaaaaaaaaaaaaaaaaaaaaaaaaaaaaaaaaaaaaaaaaaaaaaaaaaaaa

SEQ ID NO: 58983 - DNA, 540 bp, Homo Sapiens
  misc_feature (488)..(488): n is a, c, g, or t
  misc_feature (499)..(499): n is a, c, g, or t
  misc_feature (505)..(505): n is a, c, g, or t
  misc_feature (516)..(516): n is a, c, g, or t
  misc_feature (535)..(535): n is a, c, g, or t
acatttttgtgttgttttattatatgattttttaagttacaaaaaaaaaaaagagggaagaaggaaaagcaataaggcaaacttgccaataggttcatgaacaaaagtcaattatggaatgtggcagaaggcaaatataaatgtattcaaagttttacctttaacaattacacttgtggttccagttatctgttgataatataaattactccgtatttagtgactcaaacaacaattttatttctctctcatgggtctggagtttggctggattcagctaggtagttcttgctgagggtcattcatggggttgtcatcggatggtggctggtgatggaagcatctgaagacttactaattgcagccaggcatggtggctcatgcctacaattccagcactttgggagactgaggtaggaggattacttgagcttaggagttcaagaccagcctgggcaacatagtgagaacccatttcgaattatttnaaaaaaaaaanttaaanccaaaaggaantgaaggcttactacttgcntattg

SEQ ID NO: 58984 - DNA, 2212 bp, Homo Sapiens
cttcaggagaggatctgtaagagtacacaaacagagtgagccattgccatagaatattctcttgacaggaccctagctcataaacatttcttcagaactatacttcaaatgggatgctttgtattaaaactttaataaatttaatttattttttcttttgaatataaataactgagcttaagcattatcatcatatcgatttcttatgctgcctaaacctcttaattttagtcgaaatatatctttttttttttttggaggcggaatttcattcttgttgcccaggctggagtgcaatggcacggtctcggcttaccgcaacctccgcctcccgggttcaggcggttctcctgcctcggactcccgagtagctgggactacaggcatgtgccactacgcccggctaattttgtatttttagtagggacagggtttctccatgttggtcaggttgctctcaaactcccaacctcaggtgatctgcccgcctcggcctcccaaagtgctgggattactgagccactgtgcccagcccaaaatgtatcttatacaaacattgtagaaatgaataatgattactcaaataagatcttttaattataagcttctggcatctctatttttcccttaagtaggggatactaaagtgaatgattttctaagaggatcttttgaaactctttagtacaatatttgagtaaaataaattattgtggatcttttgaaactctgtgtagtattcgagtaaaataaatatttgacatttacagtagggtacaccctaagttgtttatgaattccttataccactgttatatttaatttttcagataaaatatgtatgggaaaatgactagagaaattgattcttttttaggctcagggacaagataagtgactaattatgaaccccaagctctaattgtatgttcagagtgatgtctccataaaattacaaatgtcatgtactttcagggtagctccttatttagtcagaaatctcagagattaaatgtgtgaatatttagggtttttgcatatttttgaccaaccaatgaaagcgaattagttcagtttagaaagtttgatgtctatacttgtatatacctctttaaattttagaacttcgtaggttattcatttttaaagagcaataaagtttgtataagatagtgattgctttccttctattctttaaatatcaaaaatagagtatctctctgtcttcactattctcatccttggacatttcctctcccctccccttggtattctcttttttgaggggggggtgttctaggtgagttaatccttagtattttcagtagtcattgctataaaactctcagcttcccctccatactttcaacctaacacttctctctcccaacttatctctgtgtaatctcccagttcatgattaacaaattataattttattgagggactgttctaatcctgatatctcagattttcttggctgttatctccctatctttctgtattctatgtcagtcagagccaaaatccttttcatcatcccaaatctttctatccgccacatcactgattcatacaccctagtcttccatcacagtctcttaatttttaagttttttttttcttactactcctttcatacttattctttaatttcatggaaacactagagtagctatcttaaactaagactacagaccattaaaaagtcagtttctcagccaggcacgagaaactactaacacctgtaatcccagcactttgggaggccaaggcgggcagatcacgagaggtcaaggagatcgagaccatcctggctaatacggtgaggccccgtctccactaaaaatagaaaaaattagccaggcgcctgtagtcccagctacttgggaggctgaggcaggagaacggcgtgaacccgggaggcggagcttgcagtgagccgagatggtgccactgcactccagcctgggtgacagagcgagactccatctcaaaaaaaaaaaaaaaacagtttctcagtccatgtaaccacctttcaaatgatcagtagccacatgtggctagtggttaccatattagacaattgaggaaatattgaacatttccatcatcacagaaagtacggttggactatgggccaaatctagcacaccacctgcttctgggtggtcttcaacctaagaatagtttttacgtttttaaatagttg

SEQ ID NO: 58985 - DNA, 1684 bp, Homo Sapiens
gctcagaaacgccaaaatctacgtggagagagctgtcaagcagaagaagatctttacaatccaaggctgctacccggtgatccggtgtctcttgcgccggaggggctgggtggagaagaagatggtccatcgctcaggccccaccctgctgccaccccagaaggatctggatagctcagcgatgggtgacagtgacaccactgaggatgaggatgaagatgaggacgaggagttccagccatcacagctgttcgacttcgatgatttactgaaatttgatgacctagatggaacacatgctctgatgcgaaggggcagaactcaggcacctcgacactcaggtccagcgctgtgaggacatcctgcagcagctgcaggccgtggtaccccagatagacatggaaggggatcgcaacttctggatcgtgaagccaggagccaagtcccgcggacgaggcatcatgtgcatggaccacctggaggagatgctgaagctggtgaacggcaaccccgtggtgatgaaggacggcaagtgggtggtgcagaagtatattgagcggcccctcctcatctttggcaccaagtttgacctcagacagtggttcctggtaactgactggaacccacttaccgtgtggttctaccgcgacagctatatccgcttttccacgcagcccttctccctgaagaacctggacaactcagtgcacctgtgcaacaactccatccagaagcacctggagaactcatgccatcggcatccactgcttccgccagacaacatgtggtctagccagaggttccaggcccacctgcaggagatgggtgccccaaatgcttggtccaccatcatcgtgcctggcatgaaggatgctgtgatccacgcacttcagacctcccaggacaccgtgcagtgtcggaaggccagctttgagctctatggcgctgacttcgtgttcggggaggacttccagccctggctgattgagatcaacgccagccccacgatggcaccctccacagcagtcactgcccggctctgtgctggcgtgcaagctgacaccctgcgcgtggtcattgaccggatgctggaccgcaactgtgacacaggagcctttgagctcatctataagcagcccgtcaccacttccccagcctccacaccaaggcccagctgccttctccccatgtactccgacaccagggccaggtcctcagacgacagcacagcaagctggtgggcactaaggccctgtcgaccacaggcaaggccttgaggactctacccacggctaaggtcttcatttccctcccaccgaaccttgatttcaaggtggcacccagcatcctgaagccaagaaaggctcctgctttcctgtgcctccgaggcccccagctggaagtgccttgttgcctctgccctttgaagtcggaacaattcctagcacctgtcggaaggtcaaggccaaaggcaaattcaaggccagactgtgacaaacccagggctgaggcctgccccatgaagaggctgagccccctgaaacccctgccccttgttggtacattccagaggcgcaggggcctgggggatatgaagctagggaagcccctgcttcgattccccactgcccttgtcctggatccaacaccaaataaaaagaaacaagtgaagtaaaaaaaaaaa

SEQ ID NO: 58986 - DNA, 480 bp, Homo Sapiens
ttttttcacattctccacagaattcaaattattccatttttaacttcacattctacagtgagtttttctataggtaaatattttcttatatatgttctataaaatttttgatattacaaaacagaagcttggtacatcagttctaagtgaatattttatctccaattctaaaactgacatatttcctcagaaaaaaatacctaggaaaaatgtcatttattcaaaatatgaaattttattataattgatgtttaatgcaattcactttacgaaggtttttgtggttttccctaaaatttctgttttaatgaaggctcctgatcatcctggatgtcgacaagttttcttcttcatgtgacgtctctgatgcacaataaactgattagtttttctaaaactgattatattcatagggtttcatctcactctaacataaagtttaagctaaactacgtccatttaactaataagccaaatttg

SEQ ID NO: 58987 - DNA, 1976 bp, Homo Sapiens
aaatatcagtcttcacctcacaaccccctcgcccccaacaaggacaagtgaagctcaccatggctcaacttactcagttaacacagggccacggtggcaatcaaggtttgacagtagtaattcaaggacaaggtcaaactactggacagttgcagttgatacctcaaggggtgactgtactcccaggcccaggccagcagctaatgcaagctgcaatgccaaatggtactgttcagcgattcctctttaccccattggcaacaacagccaccacagccagcaccaccaccaccactgtttccacgacagcagcaggtacaggtgaacaaaggcagagtaaactgtcaccccagatgcaggtacatcaagacaaaaccctgccaccagctcagtcatcaagtgtgggtccagcagaagcccagccacagactgctcagccttcagctcagccccagccccaaacccagccccagtccccagctcagcctgaagttcagactcagcctgaagttcagacccaaacaactgtttcatcccatgtcccttctgaagcacaacccacccacgcacagtcatccaagccccaagttgcagtcacagtctcagcctcaaagtaatgtccaaggacagtctcctgttcgtgtccaaagtccatcacagactcgaatacgtccatcaactccatcccaactgtctcctggacaacaatcccaggttcagactacaacctcacaaccgattccaattcaaccacatacatctcttcagataccttcccaaggccagccacagtcacaaccccaggtggtgatgaagcataatgctgtaatagaacatttaaaacagaaaaagagcatgactccagctgaaagagaagagaatcaaagaatgattgtctgtaaccaggtgatgaagtatattttggataagatagataaagaagaaaaacaggcagcaaaaaaacggaagcgtgaagagagtgtggagcagaaacgtagcaagcagaatgccactaagctgtcagctctgctcttcaagcacaaagagcagctcagagccgagatcctgaagaagagagcactcctggacaaggatctgcaaattgaagtgcaggaagagctgaagagagacctgaaaattaagaaagaaaaagacctgatgcagttggctcaggccacagcagtagctgcaccctgccccccagtgacaccagctcctccagcccctccagcccctccagcccctccaccttcacctccccctccacctgctgtgcaacacacaggccttctgtccacgcccaccttacctgctgcttcccagaagaggaagcgggaagaggaaaaagactccagctcaaagtccaagaaaaagaaaatgatctctactacctcaaaggagactaagaaggacacaaagctttactgtatctgtaaaacgccttatgatgaatctaagtgagtagatctttttgagctctagttttttgtcttgaaagtttagctattaaattggattttgaagaaaatgaatattttgggagtgatataaatgaaaatattaaatttaagagtaatgtttcatccatggtcttgcatgtgatattcttaccattgacgctagtaaagtaaaatttgctatttcacgtgtttgtgattgtcctttgttatattcttttctgtcaaaaacaagctttctgttgctcctttgctttctcttcttccctatgaattaactccaaatcagtgagtaattgatgtctggagaaggaggtgtattactgttgcccaaaatggagagcatcctttctgggatctgttcaaagccctgcgaatacatgaaatcctggaaaccagttgaacatgaatggtcagaggttttgaatttgagtggttcggtttcttaattgttttattttaagcagttgttttttttgtattaaaatactgcaactcaaaaaaaaaaaaaaaaaaaaa

SEQ ID NO: 58988 - DNA, 3074 bp, Homo Sapiens
gaagtggggatcggcgagcgggtgggtgcgcctcgggccgcgggactcgcagccgccaccgccgctgccgcctctacggccgcgtcagaactgaagagaggaaggggaggagccgagtcgagcctaagctgccgcccgatcttacccctgacccgagggcggcctggagagcttggtctgtagcggtttccttcggggcaggtggggactgctcctttgggaggaaggaggaggcccaggccgcgtcttcaggcagctgcgcgcaccacccgaaggtgaggcatttggccccaaacagaccctcgaaaagccggactgatcgaggagttaccctacagcctgatctgcacctgctccagggagagagcgccccacccttcccgtggcgtggggtgagacccagcgttggataacgtgtggtcgggccgagcaaatgtttgatgaatgaatgaatgaatgaatgcctctctcacgtggcactcgtgaagctcagaggatatggtggaagtgcaagcgctttgtaaactgcagtgcattgtaaaaatgagttgtaatacattcctcccctccccctagccatgaaaggaaacaggggtgcggcttgagtacagagtcacaacctgagtctttagtggaaaaggagacgaaatgccgagcaagggaagggacccatcctcgcgcagattgttagggcggcgggaagggaggattggaagggagccatcctctgggagattgctgaaggatttttgactgtcaggggaagaatttaatagtccctcacttttacgaatggttctttcttacggtttggagctttcgagagcttctggtcttggttcatcagtgtacgttgtcatcaagaaatgttggcctgtttcaggtctgactcaaaggttattttctttctaaaataagtgttattactattatgcagcttttcctacagatgttatcctggaaaggaaagttaagtagaaactcatgaagtttaaagtgtagttctctaggaaaacaaatttaagataaaaggaccagaatcctcagaaatctgtcttcagtgaatagtatgagaaaaagattaaagcagcagcaatgatgaaagcagattccacaattctgtccctggaccctagtacactctacctccttgggaagcagtagtaatggattttacaagtctttccacctggaggagggggtaaggtaggagcaagtgtattatagacaaatgtgggaagctctgggtttctcccactactgccactaccatctgcaaacagtaaactaaggaaacttttaactgggtaaatccaagggctcgtgttcattaaaatgctgcgggaaaggtggtgagaggggcaaaggaggatgtggcaaaaccaaggagagactcacagactagcacctgaccctactgcccttgacctgaagttccaagagccaggttaaatatcctgcttaaattaccctggatttttctgtctttacgtgaccaatcccctgctacagccttccaaataagactcacaggtaatcagaccaacaagtgatggtctcacatggctacaaaataaatattttttgtttttccccctcttcctatcttacaacaggggaatggtggaaattaaaggagtaaaacacacagatttaggggattttgtgaagctaaacacctcagagagtttaacctttgtaggctttgaaggaaaagagtgcaaacatcagagttctgcagcccagcagagaacacctccagttaagtgtgtaccacatagggtttttcagcagcgtgatcttctgttttcattgtcagtggctccaccttacaacctcagtgctgaggaacagaagggcactcaggagagcctgagccacttacttagaaagtatttaataacagcacactaagcttactgggctagatacccacctcagcacccagcttgataacaggaggaaacagctggaactggagactggagagaaggaagttcatacatttccaacttggtctgcatctctttagttccttgtattgcttattaatccagaggagaaaacagctagttaattaaaaattccaaaaaatctgaagttttagctaatagttacttccctggttcatcaatttaagataaggatctaaatactgtgttaaaatatagaaaaacggagactcttataaggtttttgacctctacacttgaaagtgagctcttacaagaaactaatcagtgtttcgttattccatatcagtggcttttactgtcaaagattgtgtaagctaaattatctggcaaaattttgctttccagaaatactatctatattaattttaacatttttattgtgaaatatagtttaaatacataaagcaattatatagtataagtgattataaaggaaaccaccatgtaaccaatcaaccaggtcaagaaatggaatatttccagcaactcagaagttcccctccctgccatgaccttcccgaacacaactctttccctccctcctaagtgtagtcattattctaacatttgtgataatcatttccctgcttttctttgtcgctttgtcgcaagcatgcatccctaaacaatatattgtttagtctcactctttcttttgaactttatgtaactggaacaatataatatgtaatctgttgttcttgctgcttttgctcaacattgtttttaattcatatgttgttcaggttgttcctatagctgtaatttgtgcattttcattgctgcatattacagtgtcccattataacaatatgtgacaatatgtttagccattctattgctgatggacatctgggttgtttccagtttaggattgttataaatgctaatgtgaacattcttcatatatgtattccatcacatctacgtcagtttctgtataacatatacctgggagtgtaatatgtatcataaacttgaataaataatgccaagttcttttctagagggttacacagtcacaaaaaaaaaaaaaaaaaaaaaaaaaaaaaaaaaaaaaaaaaaaaaaaaaaaaaaaaaaaaaaaaaaaaaaaaaaa

SEQ ID NO: 58989 - DNA, 507 bp, Homo Sapiens
atttggccctcgaggccaataattcggcacgagggagctaaattcagaggctgccaatatgttcataactcaaaaggatcacttatcccaataacttaggaaccgttggcatccatagccctaaatcggaaaatgccgaaatcagaatcatttccccctacattgatcacagtgacctttaatcaccttcagctccctggtctcctagagccacgggtcagcccctcactgccctcctccaaagacaagtctgctcagaatgtcactgaaactctgagcatccactcaacaagcctccatcttcttactttctcatcttttctcttttaggcctgaagaagtcagtgatttatagttcactaaaactgcacaaaatgtggaaagggtggctgaggaaaacatcctgattttgcttgcttttatatatgttatgtgtagatgaataaagtgtttgatcctttttgacaaaaaaaaaaaaaaaaaacgaaggcggccgcaagcttattt

SEQ ID NO: 58990 - DNA, 2346 bp, Homo Sapiens
tttttttttttttttttacttttttttggtttgtttttaaagaaactgcatacatcatcagagacaaacaataatttaaataccatgcagtttctgtatgtacaaaacctaggccacagagatccagtttaatttgtattctctatttacatcgttttcctcatacagccatcatctgttaaattagaacctgggagattaggggattgacggtcaccacactcactcctatacaaagacaaactatgtacagacacccaggaagcaactggaaaatgcaaccggtctggggattaacagacagatagggagaaaaagtcatttaaggtgacctttgcccaccggctgtgcacagggagagcctgaaattccattcatcaaagcaacacaccacgattttcattcggcaaataaaaatacatgttcataagcgggagaaaaataaacccagagcttttcatcacatgtaccgtcacgttgtttggtttctctaatctgacataaaggctaaagttttaaaagttttacagtgctttgagggcctttagagatgaatatatcagccatttaaaaaaagctagttggctgatggcggtctcttctgtcactgattgattgggggcgggggcagggttgggcaatgtctaatctttagaaggaagcatttgatttgagacatttcacattttttcctctcacgctaatccaaatgaaaaaatgctcaactgggaatttacacacataaaataaactttgacttgccagctacagctttttcaaaaaagagatgcattttaagtcatctagctcacctttttattttttcccttaattaatgtcaaattgtcatcttggaaagtaacacaaattgctgcagttgtcatgacattgtagtgaaaaaaaaaaaaaagaaaattgaataggtctctagaaagaccttaaggttttaagaaaggaaagagacagcagaaggcccatcctgcaggccacagaggttgctgagcctgtgtaagagccacttaaaacgggcttgaaatagcccatcctgaaggcgcaggacctgtcaatggcaggggaggtgcacccctcagtctgagcaagtgactgctggaaaggaggccctgcaggaagagcagtggaaattgtgttcaatatcttccatgcacaaagtggactgcaacatgagggcactttgggcggaaaccctgggctgtctgctggctggctgcagggagatccgcttgggccttatatccccagggaatctgaagggccaagaactaaggccagcagagaagccatgggcctatcatgggaggagtccggtcaatggaatgaatttccttaggactcgctcctggccagggaggaccatcatgccagggcaccgcatgtgccaggagcccagctgcagttagaggaagttcagactcaaagcctggccggcaggcaagtccacctggaacacgtgtccgcccgcccgccgtagagaagttcaacgaaagagccctacatctttcgtcataccatttgcacattcaaacgtcagtaagcctttcgggaagactgtgtttacagccacactaaaatcccgatcacattttccctgaacaatacctctccccacggcaggaactattcagattcaagagttaaaaaaaaaaaaaaataggatctagtgatggcatcctccttgggtcgggcagaggcgtgctggctccaggtggcaaggcaaagctgcagctggaggcaccgcccaaagagctgccctgaactctccccagcagttgtttggctcctgggttagtgcctagatgggagccgttcatgcctgcaaaaaaatgcaatggcctcgttgacgggtgtgcatcctaagagtaacctgctcccacagggtttgtggtggggagacgactggttaactttttggaaaggccaagctggcgtctttctaaatggcatgtgtggtggagtgttccaccacctagaaagactggagtaacgatggagtcactccagaaggtgagagctctgcaactgagggcctgcgagctctgttacgaaggaaatcgaaagctgcaatgggcctcgttaggatgctgttagggtttaggagggtcctggcctcattgcacaccctatcctgggtgtcccagtcagagacacacccacaatcacgctccctggcatcatgagggtagagggaggagctctctggatcaactggagcaggaaggggcactgtggacaggtgtggctggtgttggcctgattctggcacattcccaactctggggctccttcacagaaactcttcagtgcaaaaaaaaaaaaaaaaaaaaaaaa

SEQ ID NO: 58991 - DNA, 571 bp, Homo Sapiens
  misc_feature (441)..(441): n is a, c, g, or t
  misc_feature (467)..(467): n is a, c, g, or t
  misc_feature (479)..(479): n is a, c, g, or t
  misc_feature (508)..(508): n is a, c, g, or t
  misc_feature (513)..(513): n is a, c, g, or t
  misc_feature (539)..(539): n is a, c, g, or t
  misc_feature (557)..(557): n is a, c, g, or t
  misc_feature (566)..(566): n is a, c, g, or t
  misc_feature (570)..(570): n is a, c, g, or t
gaggcagagtcttgctctgttgccccggctggagtgcagtgacacgatcttggctcactgcaacctccacctcccgggttcaagcaattctcctgactcagcacccaagcagctaggattacaggcatgcaccagcacgcccgactaatttttgtatttttagtagagacggagttttgccatgttgggcaggctggtttctaactcccgacatctggtgatctgtctgcctgggcctcccaaagtgctgggattacaggcgtgagccaccttgcccggcaagcagcctctgatttcaactcaagagacagaagaggatcccaaattccaagcaactcccaagatgcaaatcaaaatatggaaatgttaaacaaattgaaggatttcccaatagttacctgcaacacctaaaggcactggtttccaaatgggcaagaactntgcaaacaatatgttggttgctggtnaaatcaaggccnggacctttttaccggtttaacattttggnttggnccttttgaatttgggggaaactttanaccccctgtttaacttanggaggcctnaaant

SEQ ID NO: 58992 - DNA, 4261 bp, Homo Sapiens
cttttgaaagtagccttgatcctaggcattgaaatccacgtcaatgtggaattccaaggacttatacagcctcctgaggaccaagagaatgaacggataggctggcgggcactggtgcaccccaagactcatcctgtgtcagagtatgaatttgaagtgatcatcggtggggatggtcggaggaacaccttggaagggtttcgtcggaaagaattccgtggcaaactggccatcgccatcacggcaaattttatcaaccgaaatacaacagcagaagctaaagtggaagagatcagtggtgtggcttttatattcaaccaaaaatttttccaggaactgagggaagccacaggtattgacttggagaacatcgtttactacaaagatgacacacactatttcgttatgacagccaaaaagcagagtttgctggacaaaggagtgatactacatgactacgccgacacagagctcctgctttcccgagaaaacgtggaccaggaggctctgctcagctatgccagggaggcggcagacttctctacccagcagcagctgccgtctctggattttgccatcaatcactatgggcagcccgatgtggccatgtttgacttcacttgtatgtatgcctccgagaacgccgccttggtgcgggagcagaacggacaccagttactagtggctctggtcggggacagcctcctagagcctttctggccaatgggaacaggaatagcccggggctttctagctgctatggactctgcctggatggtccgaagttggtctctaggaacgagccctttggaagtgctggcagagagggaaagtatttacaggttgctgcctcagaccacccctgagaatgtgagtaagaacttcagccagtacagtatcgaccctgtcactcggtatcccaatatcaacgtcaacttcctccggccaagccaggtgcgccatttatatgatactggcgaaacaaaagatattcacctggaaatggagagcctggtgaattcccgaaccacccccaaattgactcgcaatgagtctgtagctcgttcaagcaaactgctgggttggtgccagaggcagacagatggctatgcaggggtaaacgtgacagatctcaccatgtcctggaaaagtggcttggccctttgtgcaattatccatagataccgccctgacctgatagattttgattctttggatgagcaaaatgtggagaagaataaccaactggcctttgacattgctgagaaggaattgggcatttctcccatcatgacaggcaaagaaatggcctccgtgggggagcctgataagctgtccatggtgatgtacctgactcagttctacgagatgtttaaggactccctcccctctagcgacaccttggacctaaatgccgaggagaaagcagtcctgatagccagcaccagatcccctatctccttcctaagcaaacttggccagaccatctctcggaagcgttctcccaaggataaaaaggaaaaggacttggatggtgctgggaagaggagaaagaccagtcaatcagaggaggaggaagctcctcggggccacagaggagaaagaccgaccctggtgagcactctgacagacaggaggatggacgttgccgttgggaaccagaacaaagtgaagtacatggcgacccagctgctggccaaatttgaagagaatgcgcccgcacagtccatcggcatacggagacagctgacacaagagcgtggggccagccagccgtcctgctgcctgcctgggcaggttcgccctgcccccaccccccggtggaaacagggctccatgaagaaggagttcccgcagaacctgggaggcagcgacacatgctacttctgccagaagcgggtctacgtgatggagaggctgagtgccgagggcaagttcttccaccggagctgcttcaagtgcgagtactgcgccaccaccctgcgcctctcggcctacgcctacgacatcgaggatggtaaattctactgtaagccacactactgctatcgactctctggctacgcacaaaggaagagaccggcagtggctcccctgtctggaaaggaggccaaaggacccctgcaggatggcgccaccacagatgcaaacggacgggccaacgccgtggccagctccactgagagaaccccaggttcaggcgtgaacggcctggaggagcccagcatcgccaagcgactgaggggcaccccagagcggatcgagctggagaactaccgcctgtccctgaggcaggctgaggcactgcaggaggtaccggaggagactcaggccgagcacaacctgagcagcgtgctggacacgggcgccgaggaggacgtcgccagcaggtcagcacgcagggctgcagggcgcccacccgccacacggccctaagagcctcctcacctctgtgtgtctcggtttcttctcagtgaagggaggcctcctgtctttcctgctgcccgcagtccattctccccagtcccttttaggttcttagcctcatcttctagtcagtgaggactcctccatcagactcaattcagagattcaggaagtatttattccttgaggacctgacatgtccccagctccaagtctgtcattgggaaggaaagtggcaggctctgcccccgggttattcacagattcagcagagggaaggacgggcacacggggagggactctgggtgattcagccaccagtgcaccgggccgtcttgagggaggcctagtccgtcccccaggcatctttttttctcctgtaggtaaagaaagggactgaaaatgtgtgccccaggggccgcatgcagcaccagtggatgcatgcttaggcagttccagagctgtaatcacatccagctgggtgacacctttggggatgtgcatgctataaccctaggactccctatatccactgccctgcaccccagggcttccagtatcagcgaaggcttcaaagtgttcagccgattacagatgatcaagagagccaagaatcaaaagggggtccggtgtcctgtggggcttcaggacagaaacacaggctgcaaacccgaggggcagaggcctcaagtggccttggagagcatttgaatcacacaccttgatttagccatgatgaagggaacatgtggggataaggagagcagagcagtttttttaaggtccaagaacgctttccagaaggtgtttgctgggccgagctgctttcagctgcacccgccacctcagccctcatgtcagacaccctctgcctagattcattcttgggctgcctcacagaccgctcctccgtgcatgccgggggcagcctctgccttggtgtctgcagttccaaagctgtcactgatggtgcatcctcatccagaactctgcttccctatccagagcacccatggaggccccactctccccactgtgcccagatgagggggagcccactctctctctccactgaccctgcagtgagggtgagagatgctgtgtgtcaaaacacatttataaacccttgagcagagctactggcttgaccttgggctgagtgtgggtcagcaccattttctccactgtaatttataaattgtgagaggcagtggggcagcaagttcatgtaatgtagcaaggacattccaggaaggctaacccctggcatttatggcaggtatgacaggagggcagcacagaaaacatgaaatcagtcagcatctatgcaatgcaatacatgcctcatcttactcagattgaagttaaaaaaagattttaaaactagcattcatgctgggcgcagtggctcatgcctgtaatcccagcactttgggaggccaaggtgggcacatcacttaaggtcaggagttcaagaccagcctggccaacataatgaaaccctgtctctactaaaaatacaaaaattagctgggcatggtggtgcacacctgtaatcccagctacttgggagggtaaggcatgagaattgcttgaacctgggaggcggaggttgcagcgagccgagatcatgccactgcaccactgcactccagcctgtgtgacagaatgagactccatctcaaaaaaaattaaaattaaaatcaaaaaataaaataaaggccaggcacggtggctcacacaggagaatcacttgaacctgggaggcggaggttgcagtgatctgagatcacaccagtacactccagcctgggagatggtgagactccgtctc

SEQ ID NO: 58993 - DNA, 503 bp, Homo Sapiens
gcccttttttttttttttttctttgtttctttccttttcttgtcaagaacagcttaatttagaaggaggacatttagtgagtacaattaacaggtttttaatatattcacaaagttgtgcaaacaatggcacaatatattttaggttatttcaccatccaaaaaagaagctccttatccttagacaacccctagtcctgggcagaccagtttctatctctatagatctgtctgtatattttctggatatttcaatacatggaattatttaatatgttgacctaccttttgatgccatggcccacctttatgcttggcgcattccagcctaacagcatcattcgtggtacttaacattttatatcatcgagcaatcaattgtctccaacctatctttcttctgccactcctcctctcttcccagccatcttcccataatgatttttcaagatgcaaatatgctcatatcttactcaagtttaatatcccaaaagggctccccat

SEQ ID NO: 58994 - DNA, 4964 bp, Homo Sapiens
atcagcctcctgagagctgggactacaggcgcctgccaccacatccggttaatttttgtatttttagtagagatggggttttgccatgttggccaggctggtcttgaactcctgagctcaggtgatctgcccacctcggcctcccaaagttctgggattacaggcgtgagccacggtgcccagcctggctcctgttttttgagacggggtttcaccctgtttcccaggttggagtatagtggtgccgtcatgacttactgcagccttgaactctttggctcaagcagtcctccccactcagcctctctagtagctggggctccaggcatgaatcaccgtgccagactaagtttttttaaaattttttgtagagagaatctctctctgttgcacaggctattcttgaactcctaggctcaagtgatcctcctgcttcagcctccgaaagtgctgggattacggttgtgagtcactgtgcctggctcttttaatcttgaaaactctgggaagagctcacttctgtttaggaggctgccttgggaactgcatctcctgggctggtgctctgtgctgcttggagtctgcagaccctatctgggtcgcttggcctcccgtgcacaagctgccagaatggaggccccattctcaatgtgggggctgcccaaagagcagggagcttcccacaggacagaggctgggcacctgcttggcctggttcttccttttcccagggctccaacacccaccccctcaggtcctcccaaaccctgcaggtccctggcctggtccgtccacacctacactcaggaatctctacacatctctgagttgctgcatctgtcttcaggcacagcccaccagcccccctgggtacccaaagacaccgcaaatatcagccattccagacaacgtcctcccgtgtccctatctcatggagtaatgcctctaattcagccacaccaagaccccacgctccacatcccctagaactctcatctcctgtggcccaacatggcccttcctttcagcagtgggatgtgggaaggatcaaggtcacccttgtccaaatcccatgcagacaacggtgttggagtcttgggcccaaagaccagctcctagaacctgcagggaagcaacggcacgttccatctctccccatgccactgaggaatcattggtggcaggattctcagcaggcatggccgtgggtgcacagaacagagaaaggatggcctggaccacacacatcactgtgtgcagatgctttcctagacactgcagccaaggacacagaggctcagagagaataacctccatctcctgggtcccagcgattctcctgcctcagcctcttcctatttcacatgtagggaaactgaagcccaggtaggcaagcctgacttgctggagtcacacaggaagttggcagctctgctccatccctgggatctggagcccctgctctggggaaggagaggtggggcgctgccttccagagtcccctcaagctggcagggacggctgtacccccagggtcagaggagaactaaaaggagcggaagctggcctgggtccagggagagacctcgtgtttgcccaaaagggagctggagaggggcagctgggcccatatgcagggaggagctgcagggagctggtggcggggcagcaaagagaagtggatttggtgggtagaggggcccctccttggttctagtcctccccgcagccccttgcaaacaggcggggctctcctgtccttctctcctgcagcaagccctacatgaagaggcctctttggtgagtggcagctcaacctctgctaaatgcctccagtgatggggagttcactaccttccaaagtttttaaaagatgttaaccactgctattcaagaacaattctagaattttttttttttttttgaaagacaaggtctcattctgtctcgcaggccagagtgcagtggtgtgatcatagctcactgcagctttgacttcctgggctcaagcaatcctccctcctcagcctcctgagtacctgagactacagatgtgcaccaccacactggctcattgttttcattttttgtagagacgggatctcactatgttgcccaggctggtctcctggcttcaagcaatcctcctgccttggcctcccaaggtgctgggattacaggcgtgagccactgcatctggccttttttttttttggagatagagtctcgctctgtcgcccagggtggagtgcagtggcgtgatctcggctcattgcaacctccgccttccgggttcacaccattctcctgcctcagcctcccgagtagctgggattacaggcatctgccaaccatgcctggctaatttttgtattttttggtggagacggggtctcaccatgttggctaggctggtttcgaactcccgacctcaggtgatctacccgcctcagcctcccaaagtcctgggattacaggctgagccaccgcgaccggccctgctgttgcttctgaggtttgaaaaccgctgcctcaatgctcctgattcagctcttcttacccaaaggttcccccacctcatctactctgttcctgcacagtcgcccttttctctgatgccccgggcaggtttctctctgccagctccacgcttctggagtcccccatccgtcttggggcccagctgcccactgtctgggttcagaccttctcaacactccctggcttctctgccctagttttgccttctccaatccactcttggtgggtggaagtacggttaccatggtaacttgaagacaacgcaaatctgattgtatcattacaatgactgggaaaacctccagtgccacaaaataaagctcaagtcactagcttagcagtccaggccctttaccattccggcagcatttctgggggctattctccttccccccactgcacaaccccgcctggccaccccaggctcaggctgcagaacagcgtagaccagggagtggctttggggtcatgctaactacctggtttttgtctctttctggctgtttgctcagttgcaaaatgggaaggacaacagcacccgcctcacaggctaagaggctgtgtgtgaaaagcccgcagcacaggatctggcacgcgtggacgtgcgggatgggaggaggggatttcccagctcctcatctctgcagggactggccttggcctagggaacactagctgtccagggagggggagctttccctgagccccccgatgtgtggcaggcagaggagagcaagctacttctgggaggggagttgtggggaagggcaagttagtctttactgagggtggcagtgagctggcactttggtctcacctcggctgcagaaacccaccctgctcccgtcttatttcctggggatttcagctgtgtgcaggcacagatgcatctccgaagtgcctcatgcttgccttgatctcctctccttcctctggccagtcctgaacctcttggtgatccacggcggcacctctgtgtcctacatccttctctggccatctccttccctccttccagccctccctctaggaccctgaccccaaccatccttcatccccatggggacattcagtccactgactcatcaccctcccctgtccctctgtgagagaaggagcaggcagagaggatcttgcaagagccttcagcaactctcttccacccatcctgttgcttgctgctttttttttttttttttttccaaaaaaatagagatggggtcttgctatgtggctggtctcaaactcctgggctcaagtgatcctcctgcctcggcctcccaaagtgctggattacaggcgtgagccaccacacccggctccgttccctttctaagcagggtgctccttttcttgccatttcccccatcctccttcctctcccacagctcacttccctctctactgaatctgctgaagatcatgcagctgctgttcctgcctctaaaaccctctcttggctgggtgtggtgggtgacatatgtaatcccagcactttgggaggctgaggcaggagaatcacttgaacccgggaggcggaggttgcagtgagccgagattgcgccactgcagtccagcctaggtgatagagcaagactctgtcccctccctccaccaaaaaaataaagccctctctgcatccattccactctccactcttgctcattctctcctgccctctaaaaggtgatctgtctttggcagattcaatcacttgcctttctcattctctcctgagcccactattccactctggtccccaccacttcccccaaaactgctttgaaccatcgcactgcaacctgttgcttagcccctccatctagtctcaggcgttaggactgactgcccagcagaggctggtgcaaccaatcacctcctttagtaagtttctccctgggcttcacctcttcacctgtgggctttccacctgtctctctctttttttttttaagacagtctcctctgttgccaggctggaatgccgtggcgcagtctcggctcactgcaacctctacctcctgggttcaagcgattctcctgcctcaggctcccaagtagctgggattgcaggtgcccgccaccacaccgggctaatttttgtatttttagtagagtcggggtttcaccatgttgcccaggctggtctcgaactcctgaccttacgtgatcctcacgcctgtaatcccagcactgtgggaggctgagacgggcagatcaccctggccagcatggcaaaaccccatctctactaaaaatacagcaattagccgagtgtggtggcgggcacctgtaatcccaactactcaagaggttgagacaggagaactgcttgaacccggaaggcagaggttgcagtgagccgaaatcgcgccattacactccagcctgggtgacgagcgaaactccgtctccaaaaaaac

SEQ ID NO: 58995 - DNA, 695 bp, Homo Sapiens
ccatcaaatgtaatttatttaaataacaatacaattgcatgttaagtaaaccagttgtagcaatataaaaatacagaatttggagaaaatctggcaaattaaacctgtatctaaatgcagcatattctgtgatactacggaatgaaaaatatacaaagatgccaattcaaatagagtgaacggcactaggtagtggtcatacttcagtagcttttcactttccacaacatgattgtaacatagttcagcttgcaagggccgctgtaagttcttgaggcaacatgctttaagtaacttcactaagcactcattcatgcaccagagaagctgttgaaattttgactttgtaaagctgcctcagcttttgcaacagttactaacagattgtcagaaaggtcttttcttttgctcactattgaaaaaccattccagacatacatcattgccagggcaggtaagatgagcttcacaggtgcaggtaaggaggcggagtaacgccgagccttcctcacagcaaacttctgagtagggatagatggcccggcaatgctgtgcttcaagctgtccacctgtcttaataaagttaccacattctcatgtcgtgctactacatcctcctctgtgagcatactcagaatgggtggtgtgaagaacacataagtggcctggaacgatgtactgtctgtgcgaagcag

SEQ ID NO: 58996 - DNA, 2337 bp, Homo Sapiens
aattattatgtggaatctcttaagtgagcaactaagaaaaagccttatagaaagactacactggatttataagtgtgtttatgtttctctaagaatgggagcttctgttaacttaggggtggagttgttctgaggaaaccagtagattggatgactgactggagaatccagaataacaaatccattagccagacatgtttacttttatattagaagtttgttgattaggtcttaattttcaaatgcaaacaccaagctttgaaaatattgcatatacaatgtattggtcagcaatttaataatatttaatttgaagttaattattgttaatccttctagaaaagttttttttctttaaataaaagtacatatatatacttttttatttagaggttaccagaagctctggttttgttttgttttgttttgtttttttgtttttttaatcattttcagatgttatccagaaatctgcaagtgtacttttcctgttttaactccttccttttatcacctgactatcagggaagcgaggttgaggctgccctgacctgacatgtcatgatgtcgacttgctaggtggggttcgctggggacgataaccagtggaattgttggtaagaacttttttttcctatttttttttttatcagtagtggggcattaagtgtgggagaatgcccatatcctataagtgggcaattatgtcagccttgtagaaaaataggactttaatattaaattattttgttcttaataggaacatataataacacttcacttacttttaaattggtagcagatcagcaggaaaggcctgcaagtatgaagtaatgaaatactcagggtatattttaagtgagcaaaatagacaccttataatcttaaaaagtctgttggagagacaataaatttgctttaactgtcatttcagtctagtactatattttctatattttgttggatagattaacatataatgcatcttaaagagatatttattgcacactaattttagtgaaaacaagaagacattgatagaatggagggcttaaacaccaaagatactatttttaaaaatcttccaaagtaatcttaacactgtaaaatgaaactttaaaaagttttagcagtttgacaataatggcctcaatttagagatatgttgagacaatgactttgggtcaagaggaaattacatagctgaaatattaagaccttgaacatagcagaaacataaacctatgaacaacttgtgttttgtgtgaaagctagggtagctgataggattagcagatattggtagaattaagagtcaatatttaaattattgctaaagattaaaatccctcatcttatagtttgtaggggattccatgatggtaaggtatagattgaaattaaatttagtaactaggcatttctgaccataccatataaaaaataattgtaatatggtataaacactgattaaaagtaattatggattttcatgcctgaagaaccttctcagtattcttacagcactgtatcttctttattggttgagaatatcagtctagaaagactttcctagatgttaaatgtgctagtcagtgtcatgaatataaacccttacttgtaagtttgctatagactagttgtacaacactagaatgaaattatgtaatacttttaagaattgtagtgattgcagggttgtgttaaggtaacattttatgcatgtgtcagtgacagaaaggatcagggtataaaacttagcactaaatagcatgctccttaggaagttttaaggtaagcagtaggaatattcatgtaattctgatgagtttatgtaagttaaggaaaatgcaatgccagtttgttgactttaaacactaaaaacaaaatacattttgtggaaccaacaaaggagacattctggggaaaaacttaaattgctcaaatttaaataagggctctcactttatatagtagatttgtcaggatcccatgaacattgcttttcttgatttctcacatatgagggttgggcaaaagggacttctctagcctcttcgataatgtaggtagacttgtacttagtgaatcccattataatgttaggtactatgttctaagactatttctataattggactgaaggctcctgcaaacataaattgctgatatggatatagtaacataagaaataccaaaatagggacatttgcaagaccttttccatttaatcatcagtttaataaaaatcatgcttttggtacagtgttcatgtaccataactgtattggaatatttgtacgatgttaaatatttttaataaaatttaacatgttc

SEQ ID NO: 58997 - DNA, 534 bp, Homo Sapiens
ttttcagttttaacattttattgtaattttatatacaaagaatgcttaacattaacagagcttagaacaacagcaacatttacagaaaactggattacagatgtttaacaactaatttgtttgaacccaaacattgttttacaaatacctgtagtttaaaaaaacaaaaaaaaaaaaccaatcccccaaaccgccccaactcctccccacaaagaaacaatggtaggaatagaccaaaaactcaaatatggtccttacagtacataagaataaaaacagtaaactataaacttctaagtgttaactctatactaaaccactttgcattagaaaattataaaataggatggctttagtccactttatgttttagaataatcaattttaatgcttagttttcccagaacaggagcttaaaaagcaatttgttactaggacattttgtcgggatacagtctaggggaaaggacataacaaagccaagaacaagatagggacagcactaatggaaaacccatcttttcattaatcttg

SEQ ID NO: 58998 - DNA, 1557 bp, Homo Sapiens
tttcccttccgctcttccctggtccagtccaccctggcggggtcgcagggttgggatggcggctggaggcgatcatggttcgcccgacagctaccgctcacctcttgcctcccgctatgccagcccggagatgtgcttcgtgtttagcgacaggtataaattccggacatggcggcagctgtggctgtggctggcggaggccgagcagacattgggtttgcctatcacagatgaacaaatccaggagatgaaatcaaacctggagaacatcgacttcaagatggcagctgaggaagagaaacgtttacgacatgatgtgatggctcacgtgcacacatttggccactgctgtccaaaagctgcaggcattattcaccttggtgctacttcttgctatgttggagacaatactgacttgattattcttagaaatgcacttgacctgcttttgccaaagcttgccagagtgatctctcggcttgccgactttgctaaggaacgagccagtctacccacattaggtttcacacatttccagcctgcacagctgaccacagttgggaaacgttgctgtctttggattcaggatctttgcatggatctccagaacttgaagcgtgtccgagatgacctgcgcttccggggagtaaagggtaccactggcactcaggccagtttcctgcagctctttgagggagatgaccataaggtagagcagcttgacaagatggtgacagaaaaggcaggatttaagagagctttcatcatcacagggcagacatatacacgaaaagtggatattgaagtactgtctgtgctggctagcttgggggcatcagtgcacaagatttgcaccgacatacgcctcctggcaaacctcaaggagatggaggaaccctttgaaaaacagcagattggctcaagtgcgatgccatataagcggaatcccatgcgttcagaacgttgctgcagtcttgcccgccacctgatgacccttgtcatggacccgctacagacagcatctgtccagtggtttgaacgcacactggatgatagtgccaaccgacggatctgtttggccgaggcatttcttaccgcagatactatattgaatacgctgcagaacatttctgaaggattggtcgtgtaccccaaagtaattgaacggcgcattcggcaagagctgcctttcatggccacagagaacatcatcatggccatggtcaaagctggaggtagccgccaggtgcagagattcttagaagaggaggtgtatcccctgttaaaaccatatgaaagcgtgatgaaggtgaaagcagaattatgtctgtagagttggaagagaattaaacgaaaatcattgttaattgctgaggcatgaaaattgtgttactataatgccttattttacctcgagaattgttaccttaaattagtacagcactttcttcttcccatggtgctttcctgtttctcagtctcacatttctcaacaaggcaaaaacaaagagcgttgaagttgactctgctcttgcatagtaaatgtagttcatactt

SEQ ID NO: 58999 - DNA, 421 bp, Homo Sapiens
cattttaaaataaacatttaattcaacattgcaacaggagttgaactgtatttaaaacagaagcatattaatgactaaaaaaatgtgtatattaatctttagttcccttttgaggggattttgattgccagttctccgcagtgaaatgctaggaaaatgtctttagaagacagaattctttctgaatgcaagtctaaaatgcttaaaagagattaaaggttttaaagacccaaatcagaaatatccattagatacatctcatttgaatcctaagagtttaaacataataaacgctgtatttatttattttatttcttttttatttttttgaggcagagtctcactttgttgcccaggctggagtgcagtggtgcagtcttggctcactgcagcctgtcttctgggttaaaacgattctcct

SEQ ID NO: 59000 - DNA, 2029 bp, Homo Sapiens
atacttgaaaattcaagagaaactgcttttaagtgacaatcaccatggagccagaattaacacagacttctgactctcaggccctttacatgtaatgattaacctcaactgaggctgttcagttgtattaggttaatagaaataagtgtagctgtatctgaaaaaaagaaaaagaaacaacaaaaaagtagtctgaacaaaggcagttagctctatgctgcccctttgtgccatgctgcaaaattacacccacctgcaatacatctccatcctctgctgtggctcatcagtagagaaaatactaaaacagtaatggagagcagaactatgactaaagtaaacgagcaattaaggtcctgttcagggaacctccattacccttggacgagctctgcacttgcttacagtgctgtctttaactgggtgtatgatttagctgtggacccagtgctactaattctgcctgtttctgaacaacccagctccgatattttgcacatgcacctcaactggattccaagacaaatgtgtgtacatgtgggcacatgtgctcaagttgtttaggtctcttgttatacggaatgtgtaatcaatgacactatacttttcatccttagatctgggcaaggtggaggggcggggcaggtgccttgatcctggagctttagaggccctcctctggaattcctctagttgtgataccacccccccaaagcatggtgtaaggaatctgctggaccaagggcatttgcccacctggagtctgcccaagtacccaggaccctgtaattctcagcctgaacagccccacctccacttccagggtttgtgttttcctcttccctgggtgatattctcctgatggtggtgcatggccactgagagagagcacaggggcaggtgcttgctggggaatgtgaaggcggtgatgtcacatgtgtgcaagtaaggcccttgtgggtaggacagagccagggtgagggccaaggcttggtctcccccactgccttggggtagagctctgaggagtcttgagattttatttatttattttttatgagacagagtctcactctgttgcccaggctggagtgcagtggcgcaatctcagctcagtgcaacctctgcctcccaagtttaagcaattctcctgcctcagcctccctagtagctgggatttcaggcaccaccacacccagctaattaagtctgagaattttaagttccaacttggccttccacagtgttgtcaaaataggaggaaagtgcactttgacctcttgattcatagatttaaaatatcctggcataaagggccttgtcccagatctcaagtgttagggaagcacttggtcattttcttccctttctggcatattagagaaaatgatgtgtacataaaatttcctcataattttcagcctcacaatttatactacggtaatgagcgctggtagcccagacaagtacatgactaggatcagaaacccgagtagaaagtaagtcagcagaagagcgagttcgcccgtgctgtgaaaggtttgttgttactgttttgtggagagggggtgaggtgggtgtgtgctggtatttcttacagagggtggtaacatccttaaaatgtatacatatataatattttctgacaagcatctggcattgtcatttgtgtcagattgtcatcattagatattttatttggaattgtttgtatgaaaaccaatcttcggcggggcgtgatggctcatgactgtaatttcagcactttgagaggcagaggcaggcagatcacttgaggtcaggagttcaagaccagcctggccaacatggtgaaaccccatctctactaaaactacaaaaaaactgttagccaggtgtggtggtgggtacccaaaatcccgactactcaggagctgaggtaggagaatcacttgaactcgggaggtggagtttgtagtgagctgagatcacaccactgcactccagcctgggaaacagagtgagactccattaaaaaaaaaaaaaaaaa

SEQ ID NO: 59001 - DNA, 958 bp, Homo Sapiens
gatgaccaggaaattcacatctatgattgtccaatttaaacatcaaagtctccaggcttatgctgcaaagagaatgtacggattgatcatgacattccttaccttcttaggcttgtttaaaagaaatatagcatttattgtagcaaagacttaaattttgtagatacaatatgaatcttttcatgttttattggaaatgctgttcatactttaacataaagctttcttaatgcaaaaaaaaaaaaaaaaaaaaaaaaaaaaaaaaaaaaaaaaaaaaaaaaaaaaaaaaaaaaaaaaaaaaaaaaaaaaaaaaaaaaaaaaaaaaaaaaaaagaaaaaaaaaaaaaaaaaaaaaaaaaaaagaaaaaaaaaaaaaaagaaaaaaaaaaaaaaaaaaaaaaaacgatggatgagtgagaagagaagagcataacaagatgagagaaatacgagaggtcagacaccgcccgagaagaggataatgagaaggaaaagagaacgcagatttagtttagagagcaacagcacacacaccgactccacggacgaccggcgcgcagagtcaaaaaagagaggagtaaaaccgaatcacgagaaagtacaaaacaggaagagaacgaagagccagacccaaacgaacgggaaagagatagacgcagagcacaaagtcaaagaaagagaacaaagcagcaggacaagagggaagagcgagaacaagaggaaagacaagtaggaaatccagagagagaatgaaaccaacagaagactacacagcggcagcagagaaacaagagaaaacagaacaaggacacacaaaagcagaaacactacaagccgaagaaacaagacaaaaggcgaaggcaagagaaggaaagagaaagctagaaggcaaccagggaaggaaaacagcacacacaaacaagaagagaacagcaagcgaaaaagaacaacgaaaaaaa

SEQ ID NO: 59002 - DNA, 568 bp, Homo Sapiens
  misc_feature (495)..(495): n is a, c, g, or t
gtatttttggtagagatggggtttcaccgtgttagccaggatggtctcaatctcctgaccttgtgatccacccgcctcggcctcccaaagtgctgggattacaggtgtgagccactgtgcctggccggccagctctttatttggtagcggtccagagtggccaagccacctgtccagagacacacagccaatctgtggcagggtcagcagcgagctcaggtcagggctggctggctggctctgcctgggacatccacctcacagaggcaccacagttccaagcgacgcctgaagaatcctgtcccttgcagtgtcccaagagcatcttcctgagcatctaatctgatccctgtaacaatcctgggtgctaggcagtggctttatcttccactgagagataaggaaatgagactcagggtagtgaaatcagaccctggacagcaacagtggcaatgaggactatggaaagggaagcttgtgaacccaacttcatgntgttccaaatctggggcaattttctgaactctaatgccatttaactgggaccaaggtttgaggaaaaaaaaaa

SEQ ID NO: 59003 - DNA, 3613 bp, Homo Sapiens; identical to SEQ ID NO: 23607

SEQ ID NO: 59004 - DNA, 879 bp, Homo Sapiens
gaccagatcccagaggctgaacagctcgactttctctgcacagcaggtccagcatcctttgaaacatgagttcttaccagcagaagcagacctttaccccaccacctcagcttcaacagcagcaggtgaaacaacccagccagcctccacctcaggaaatattgttcccacaaccaaggagccatgccactcaaaggttccacaacctggaaacacaaagattccagagccaggctgtaccaaggtccctgagccaggctgtaccaaggtccctgagccaggtggtaccaaggtccctgagccaggatgtaccaaggtccctgagccaggttgtaccaaggtccctgagccaggctacaccaaggtccctgagccaggcagcatcaaggtccctgaccaaggcttcatcaagtttcctgagccaggtgccatcaaagttcctgagcaaggatacaccaaagttcctgtgccaggctacacaaaggtaccagagccatgtcttcaacggtcactccaggcccagctcagcagaagacaagcagaagtaattggggtgcacaggacaagcccttggagaagccaacaccagatgtggaaaccgctctttccatctgtttctgtgtcttaatgtctgtagacttgtatcagtacatttcaacccaagcatagtctctctcttattgtctaagatagtatataaagtttggtacacacactttgagatctggagacctggattagagaagttagtacgggtcgggcagggactgaaatcgagaaaggtgtctgggcgctatggtttaaaaaaaaaaaattgggggcgataaaaggggcggaaaaggtaaggagggaaacggggataaatagagccgggaaaaa

SEQ ID NO: 59005 - DNA, 4021 bp, Homo Sapiens
taacgaacgtgtgagagatctacttcggcggaagtcatctaaaaccttcaatttgagagtccgtgagcatcccaaagaaggcccttatgttgaggatttatccaaacatttagtacagaattatggtgacgtagaagaacttatggatgcgggcaatatcaaccggaccaccgcagcgactgggatgaacgacgtcagtagcaggtctcatgccatcttcaccatcaagttcactcaggctaaatttgattctgaaatgccatgtgaaaccgtcagtaagatccacttggttgatcttgccggaagtgagcgtgcagatgccaccggagccaccggggttaggctaaaggaagggggaaatattaacaagtcccttgtgactctggggaacgtcatttctgccttagctgatttatctcaggatgctgcaaatactcttgcaaagaagaagcaagttttcgtgccttacagggattctgtgttgacttggttgttaaaagatagccttggaggaaactctaaaactatcatgattgccaccatttcacctgctgatgtcaattatggagaaaccctaagtactcttcgctatgcaaatagagccaaaaacatcatcaacaagcctaccattaatgaggatgccaacgtcaaacttatccgtgagctgcgagctgaaatagccagactgaaaacgctgcttgctcaagggaatcagattgccctcttagactcccccacagctttaagtatggaggaaaaacttcagcagaatgaagcaagagttcaagaattgaccaaggaatggacaaataagtggaatgaaacccaaaatattttgaaagaacaaactctagccctcaggaaagaagggattggagttgttttggattctgaactgcctcatttgattggcatcgatgatgaccttttgagtactggaatcatcttatatcatttaaaggaaggtcagacatacgttggtagagacgatgcttccacggagcaagatattgttcttcatggccttgacttggagagtgagcattgcatctttgaaaatatcggggggacagtgactctgatacccctgagtgggtcccagtgctctgtgaatggtgttcagatcgtggaggccacacatctaaatcaaggtgctgtgattctcttgggaagaaccaatatgtttcgctttaaccatccaaaggaagccgccaagctcagggagaagaggaagagtggccttctgtcctccttcagcttgtccatgaccgacctctcgaagtcccgtgagaacctgtctgcagtcatgttgtataaccccggacttgaatttgagaggcaacagcgtgaagaacttgaaaaattagaaagtaaaaggaaactcatagaagaaatggaggaaaagcagaaatcagacaaggctgaactggagcggatgcagcaggaggtggagacccagcgcaaggagacagaaatcgtgcagctccagattcgcaagcaggaggagagcctcaaacgccgcagcttccacatcgagaacaagctaaaggatttacttgcggagaaggaaaaatttgaagaggagaggctgagggaacagcaggaaatcgagctgcagaagaagagacaagaagaagagacctttctccgcgtccaagaagaactccaacgactcaaagaactcaacaacaacgagaaggctgagaagtttcagatatttcaagaactggaccagctccaaaaggaaaaagatgaacagtatgccaagcttgaactggaaaaaaagagactagaggagcaggagaaggagcaggtcatgctcgtggcccatctggaagagcagctccgagagaagcaggagatgatccagctcctgcggcgtggggaggtacagtgggtggaagaggagaagagggacctggaaggcattcgggaatccctcctgcgggtgaaggaggctcgtgccggaggggatgaagatggcgaggagttagaaaaggctcaactgcgtttcttcgaattcaagagaaggcagcttgtcaagctagtgaacttggagaaggacctggttcagcagaaagacatcctgaaaaaagaagtccaagaagaacaggagatcctagagtgtttaaaatgtgaacatgacaaagaatctagattgttggaaaaacatgatgagagtgtcacagatgtcacggaagtgcctcaagatttcgagaaaataaagccagtggagtacaggctgcaatataaagaacgccagctacagtacctcctgcagaatcacttgccaactctgttggaagaaaagcagagagcatttgaaattcttgacagaggccctctcagcttagacaacactctttatcaagtagaaaaggaaatggaagaaaaagaagaacagcttgcacagtaccaggccaatgcaaaccagctgcaaaagctccaagccacctttgaattcactgccaacattgcacgtcaggaggaaaaagtgaggaaaaaggaaaaggagattttggagtccagagagaagcagcagagagaggcgctggagcgggccctggccaggctggagaggagacattctgcgctgcagaggcactccaccctgggcacggagattgaagagcagaggcagaaacttgccagtctgaacagtggcagcagagagcagtcagggctccaggctagcctggaggctgagcaggaagccctggagaaggaccaggagaggttagaatatgaaatccagcagctgaaacagaagatttatgaggtcgatggtgttcaaaaagatcatcatgggaccctggaagggaaggtggcttcttccagcttgccagtcagtgctgaaaaatcacacctggttcccctcatggatgccaggatcaatgcttacattgaagaagaagtccaaagacgccttcaggatttgcatcgtgtgattagtgaaggctgcagtacatctgcagacacgatgaaggataatgagaaacttcacaatggcaccattcaacgtaaactaaaatatgagctgtgtcgtgacctcctgtgtgtcctgatgccagagcctgatgccgctgcctgcgctaatcatcccttgctccagcaagatctggttcagctttctcttgattggaaaacagaaatccctgatttagttttgccaaatggagttcaggtgtcatccaaattccagactaccttggttgacatgatttactttcttcatggaaatatggaagtcaatgtcccttccctggcagaagttcagttactgctctacacaacagtgaaagtcatgggtgactctggccatgaccagtgccagtcgctagtccttctgaacacccacattgcactggtgaaggaagactgtgttttttatccacgcattcgatctcgaaacatacctcctccgggtgcacaatttgatgtgatcaaatgccatgctttaagtgaattcaggtgtgttgttgttccagaaaagaaaaatgtgtcaacagtagaactagtcttcttacagaaactcaaaccttcagtgggttccagaaatagtccacctgagcaccttcaggaagccccaaatgtccagttgttcaccaccccattgtatcttcaaggcagtcagaatgtcgcacctgaggtctggaaacttactttcaattctcaagatgaggctctttggctaatctcacatttgacaagactctaaggaggagacttttaaagatgcactacatgttttttgagatcattaataaaataagcattgtgaaaacagtcaaggcaatatgaatatctccgtgtagctaattgaattggaactggaaaaatgcagacctctaaaattgaaaatgtaactattttaaatatctacaataaaataaaaacagctaatagcagagccccaatgaaatatctttatcatcaccttgcttcattttcttgaaactcaggcttgtaaatttgtgcctgcttcattatttgtgaggtgattaaagcatttctgattgtt

SEQ ID NO: 59006 - DNA, 602 bp, Homo Sapiens
  misc_feature (22)..(22): n is a, c, g, or t
tttttttttagacttttgtccntattcagaaaggacatttatacattggttccaaatgtgctaacatggataatttgcgtaacagaaaactcacattaaaattttaaggaaaaaaagagattaaacacaaggtttattcttaagtccaattcatattattactggcccacatgtagtcagagttcagcgtaattgaaccagatgtttttcctctttgcaaaaaactgcatattttaatactgaagttaaagataaaaactattgttatgcatgtttcttttagtagataagtaccataaccttgtccatgaaaaagaaaattatcatttacatggaaacagcagcccttttcaaaataattaatgagcctaatttatttggcaacccaagttgctgactttggtatttgatgctctgataataggatcctacaagggaatatgtttttaccaattatatgtgaaacaacaggaacctatttaaatgtctcattttccttttaaatgcaaagtttataactgtggatgtgaaatcaaattaaaggcagttgtgagcttaagttatccacctcttaattaactatagggccatgctgtgaatca

SEQ ID NO: 59007 - DNA, 1914 bp, Homo Sapiens
gggggggcggggcctccccgggctcggccgcgccgccgcctcctccgcctcctcctcctcaccagcgctaaagccgggactggaccgagcggagttgtgcgtgtcgccgaaggggggtgggccgggggaggggaggttcgttccgcggagccgcagccagaaccgggaccaagaatcgccttcagccctgtctggtgcatccttggcagaaagtgaggaggaaaacacccccattgttctttggcatggacacaagttcagtgggaggattagaattgactgatcagactcctgttttattagggagtacggccatggcaactagtctcacgaatgtaggaaactcatttagtggtccagctaatcctttagtgtctagatctaataagtttcagaactcgtcagtggaagatgatgatgatgttgtttttatcgaacctgtacaacctcccccaccttctgtaccagtggtagctgatcaaagaaccataacatttacatcatcaaaaaatgaagaactacaaggaaatgattccaaaattactccttcctcaaaagagttggcatctcagaagggaagtgtaagtgagacaattgtcattgatgatgaagaggacatggaaacaaatcaagggcaagagaaaaattcctccaattttattgaacgaagacctcctgagactaaaaacagaaccaatgatgtggatttctccacttccagtttttcaagaagtaagaccaagactggagtaggaccttttaatcctggtagaatgaatgtggcaggagacgtttttcagaatggagaatctgcaactcatcataatcctgattcttggatctcccagtcagcttcatttccccgtaatcagaaacaaccaggggtggactctgtatcaccagtggcctcacttcctaaacagattttccagccgtctgtccaacagcagcctactaaaccagttaaagtctcttgtgcaaactgcaaaaaacctttacagaagggccagacagcttatcaacgaaaaggatcagctcacctcttttgttctaccacctgcctttcttccttctcccacaagcctgctccaaagaaactctgtgttatgtgtaaaaaagatataactacaatgaaaggaaccattgttgctcaagtggattcaagtgagtccttccaggaattctgtagtacatcttgtttatctctctatgaagacaaacagaatcctactaaaggagctctaaataaatcaggatgtacaatctgtggtaaactaactgagattcgccatgaagtcagctttaaaaatatgactcataagctgtgcagtgaccactgctttaatagatatagaatggccaatggtttaataatgaattgctgtgaacagtgtggagagtacttgcccagtaaaggtgctggaaataatgttctggtgattgatggtcaacagaaaagattttgctgtcaaagttgtgtcagtgaatacaaacaggtaggtagccatccaagcttcctgaaggaggttcgagatcacatgcaggactctttcttaatgcagcctgaggtaagcaggaatgtaaacggagttcaaggccttaacatttttgagcactgctactactgtcattaatatgtatctgaaaaatcttgtccaatttgaaatatattaaaatttccaaactaaaattgtatcaaatgatgaatgttttatctctgagacatagatttctaatttcactaattttacatgtattttcttgtgatatgctcatttgtctttagttatttatgttcttaggaaattattttcagatttttttagtgcacaataccttgtacacagtaggcatttaataaagggatataaaaatccactcttttgtgcctacctgaaaagttaaaaaaaaaaa

SEQ ID NO: 59008 - DNA, 2250 bp, Homo Sapiens
ggaagagagccaagcagttccatgaagcttggagtaaacttatggagtggctagaagagtcagaaaagtctttggattctgaactggaaatcgcaaatgatccagacaaaataaaaacacaacttgcacaacataaggagtttcagaaatcactcggagccaagcattctgtctacgacaccaccaacaggactggacgttctctgaaggagaaaacctccctggctgatgacaacctgaaactggatgacatgctgagtgaactcagagacaaatgggataccatatgtggaaaatctgtggaaagacaaaacaaattggaggaagccctgttattttctggacaattcacagatgccctacaggctctcattgattggttatatagagttgaaccccagctggcagaagaccagcctgttcatggagacattgatttggtgatgaatctgatcgataatcacaaggtattgttatctgggacattttattttatcttgtttgattattctgagtgtacaggaaatgtaaaccatttaaattagccttttaaaatcagaagactatagatcatactacataacagtctttattgttgaaatatgtgtccgtttgagcagaacctggaagcaaactttaaaagtgatggggaagtattatttagtgtcagtgaaatacttttgcttttaattaccagatctaaaacctttttagaacttggaaagtgatttcattctctggtgctttaaaacagatttcaagaatgttttactatctttagttatgcacttaaacaattatgtaataaaatttaaaatcattcattcagtgacctgacactaagtcattgcataagtatgtagatttgtgacatgacccatggtggtcatgaccaactgcttttaaaaataccgaaccaaaactgttttaaccttgccccttgaattatagcagtttatgagtcagcagcttatgctataagggatttgattattatttacttcgagaaaactggcttccttgaaatctcctgatatgcatgtaaaactgtcatgtcatgtaaatcaaaggtaatattcaaggtgtccaactaagtgtaaggtccaaaataatgaccaaatgatataaagcaacttagccttggaaacaatatgaagcatagtactaatgtagaatagttgtattggagttgactttatataaaaatgtcttacatcactctacttaaattcatcttgtatttcttctctctagtatctgagttcagaaaacttattccatttataatgttctctttatattggttatgctattttgatcttaccattctttttaaaagtcttattacatatttatttttccttttttctttctattctatcattatacccataagagagtttgttacacctgaaaagtgaaacaaactaaattaaaataaaataaaagaataaataaagaacattggtcaagtctacaaaagttaaaaatttaaaaatcacatggctttgcttatattgaaataaatgttttgtgtatggttaatacaaacttctctatttcctggcatttattcaatgagtaatgaatagcgtaatgttactttttacataaatgccatttctgtaaactcactgtctaaatatttactactctaggtaattgccagatcttttatatattaaaggtcatcaagaatgaattaatcatttagcattagtaatacaactggaaggctcaagaagttcaagtatgtaaaaatgctttggaaagtcttctgaaaactattggactagtcctatcataaatgggatatttagatactgtaccatttgcatgtgtgcttgtgtgtgtgtgaatgtgtgtattggtgtatacgtgtgtgtttgtgtctttctgcaggcacatctcattttaactgttagagttgaatcagtcaaataatcacttttgtgataggctcacttttgtgaatgatctgagtatcagaatagaaacctatagatatggccaaatggtaatattcatttatgatgatttttttaaaaacacattaattttattgtgacagaatgttggttattaatgtttgaaagatctagttgcatacacagactcttggatcaaaaataaagagctctgggctcacttcttagatcagtctgtggccaaaataaatgaatttaattcctggcacatcagtttgtcaaaattaggcaggaaaaaaaaaaaaaaaaaaaaaaaaaaaaa

SEQ ID NO: 59009 - DNA, 403 bp, Homo Sapiens
  misc_feature (360)..(360): n is a, c, g, or t
tggaaaagcataggaaggcattctcctttttcatttttttcctttggctggcagctcttcccagtgatgttgagagcacctgcagcaatctggtccccagtcgcacaacttcccacatacccagaggagagcatatgcctgtgggggcagtgctgatggcatccagagtcattgctgtggctgagctggaaggaaatcaccaggtgccaccgtcaatatttatcagctttcagcactggttttgttagacagtcagggtgtattatttcaagagcttcaataaaatcctttttagtgctatttctcaggttttctcagtcaaccagctagatgcatgtgatgcatgtctatccttcattnttttttttttcatttctggattttcctgggatttctgacaacc

SEQ ID NO: 59010 - DNA, 569 bp, Homo Sapiens
  misc_feature (422)..(422): n is a, c, g, or t
  misc_feature (457)..(457): n is a, c, g, or t
  misc_feature (466)..(466): n is a, c, g, or t
  misc_feature (471)..(471): n is a, c, g, or t
  misc_feature (493)..(493): n is a, c, g, or t
  misc_feature (511)..(511): n is a, c, g, or t
  misc_feature (517)..(517): n is a, c, g, or t
  misc_feature (554)..(554): n is a, c, g, or t
  misc_feature (558)..(558): n is a, c, g, or t
  misc_feature (566)..(566): n is a, c, g, or t
ataataaagtctgtttattacagcaattaacagagcagcgtttgccggcatgcttttcagtggcaaccagaaaagtgcttactccaggtgcatagattcgggaaaccatgcaacttgagccaaaatgaaaccaattagaggcttagtaaatgggttccagccaccccaggaaacttaaccatccacgagtcagttcagccgaggtagaacctcagtgcaggaatttagcatgatatagattgctactttacagaattaatccagacctgtcgccagggttgtggtcttgaggacgtgaaatgtatccgcccaacacagccacccaggtgctgggttcaaatctcgataaactacataggggtatataggtggggaacgttagcaccattgactcttaagggtctcttgccactgccatggangtggggacataaggagaggactagaagctgggccnaaagggacnagacngagaaagaaccgaaatccttcnttaacctggcttcaaaanctggantggaaagtggccgcttgataggggtaagaggaattcntttnacctgganaaa

SEQ ID NO: 59011 - DNA, 484 bp, Homo Sapiens
aattgcacatctgttcacagaggttggcaaaagacactggaagtgattgtgaaatccacattgtgattcctcaggaatcagatcctagaagggggtgcccagagctgtcggcacaccgtcccaggagtctgcctgtgcagctcccagccaggcaagaagccctgaaggcagagtcccaggtggacacagctggacgcctctctgacaattgtggctctggtggtgaacccctcggtgtctcttctgcacctctcaaggctgcaaagtgccaaatactcttttccaaccagctcccgaattcccccctccatctgggactgcatgtcctgcttagcgatttcaagcaatgatttcaccttttcatagacaaggacattgtctcatcagggcttgaccatcactctgatttccaatgctgacagccaagtggaggtttttattcttaaagaatgtggcattaaaagaaaactcaccatctcatgtc

SEQ ID NO: 59012 - DNA, 566 bp, Homo Sapiens
  misc_feature (516)..(516): n is a, c, g, or t
  misc_feature (563)..(563): n is a, c, g, or t
  misc_feature (566)..(566): n is a, c, g, or t
gcttagcttgtttccccctgtgtagaattgtaacagatccatgtgttccaattattttcttttttaggattatatttcacacatttgggggccctttttgtacaaatattggcatgtaataaggaaaaattgcccatgatgctgagataataccagtgtttttagtggtagaaaatattatttttttataaaccatatctaaatatcttgagataaaaattcccctttgactttttttcctctcccttgtttggcaaattccattttaaaattataaattgctaaaaaatgtcctttccatactatttctctcttccttgtactcatcctaagaagtcttaaatctggaacatttgcttttatcttatctatctgtttcctggctactagaaagaaatttttttagcactcatatcaccctaccatgaaggtctaaatgtaagatgactgtaggacttgaaacaaaaaaaaattaaaaaggatccacactcattcttgggattttgaagccaaagncttttcctaattcttaaaggatattggggatgggttaacttaaaagnggn

SEQ ID NO: 59013 - DNA, 1713 bp, Homo Sapiens
ttccaggtggcatttgttagctggtagacaaggactttgccgtgaatttgttagtagcaaggaatgatttcttccagcttccttgaaatgaataattagtaaacttctaagcaaagtcaatgactaggagtttcacatgtttgtgaggtcctaactaattctcttacccagatgccacctccatgaatgatggtgctttaggcttctggaatatgtaaaaacagcaaagggaaccaagtctagactgcatactggtaaaccagggaagactcagaactgcatatgcatcctcatgcattcctttgtaaagaccaccagtactaaaataactggacactcattgtacctcccagcgataagtatgtgtaacaggccagtgtgttgtccccatgatcatgaattaggcttgggatgcttccaaatatattcaaggtgttggaacaggataggcagctgtgactccctcaagagtccttagaattctaaataaaatgcagagccatcctaagacacaggggtatggacaaggcctggtgacaccaaaggtgcttgtatccaattgaaaaggtgcctgtctcaatttcataccacctttattgcagttaaaaaaaaatcacactctggggacacttggtggaattacagagccaccatcatcattccaaccactatttcattttctgtagttttacctgtgtgcaattactccccctccattctgttccacttcttactccttagtaccaaatcctctgtttgggattgagcgctgctcctggttaatcattcctactacaaaaaaaaataactcccagggctagttaaattgtaaaccaaggctcagcagtctcacaacacatggaccagaggtgacacacagccatttcctttgccatgtggcccagttgctgctgccatgcctccatttccacactggatgcctacggcagtgagatttcactgccggggtaagagttcagcctggatgattttatagctctgttcctagcacttctcatcatccttccagcccagaatcagcggtcattctgcatattcccaccaaccctctacccccaaacacttcagtgtacctcattttaagagttgctgatccctgattctaggacgtttttacccatagttcttgtctttccaaaatctgaaactcttttttttgctcagaactgggtagccaagggttattttatttttatctttaaaataatcaaggcagtcgctagagtttctccttgtgaatagatcactctagcattttaatgaaaaagaaaaaaatctttctggggtatgttgtatcatagtaatggctcagtaaccacatattttgtcctttccatgtcactgattccttcatatgagactatttggcttgactaccctgtatattgtgtagaaatcaaagttcttatctgtacatttctggtccaatacctgtcttattagttgtccttccccactaaagtttgcaaaacagaaaatgttactatttctggtatttaatgacaatgaaaggtttggtcatatttcatagtgcagtagcgataaggagggtgtctcaagtttgcttttgtgtttcttctaggctttgttcttgattttagacagatgagccagtgttaaggtgctacttcagagaataaattagagaaatcagatttgtaattatgcatgtaataaagcacagccttatcc

SEQ ID NO: 59014 - DNA, 529 bp, Homo Sapiens
  misc_feature (21)..(21): n is a, c, g, or t
  misc_feature (105)..(105): n is a, c, g, or t
tttttttttttttttttgatnatgttacaaggcaactaatacctgcacaaattagaaaactcagaagcaggacttcaaggctttttttttttttttttttaaatnaaggctcgaaagaaggaaaaggactgaaactataaatgaaacccttcatgtttctagggctgccagtcagctgcttttagtgcctgcctcagttccgcccactctgggcagggagggacctatcgatgtgcctatctttctacacaggggctgtgaatgaagctgcaggctcacgtgtaaggggaaggccaggcaaggacccaggacagtctgctgcagaggaaaggggcacctgacagctaccgacagaggaggagggcgcactcccctggaggaggagcaagagctgtgagcctcctgagacagccaatgctaactcggtgaaaaaggttaagaccgactaacattcacaaaacagccaaggcataagggctctgcagcttaagaatcaatgcggaactcagatctacatgaattccactca

SEQ ID NO: 59015 - DNA, 544 bp, Homo Sapiens
ccaatttttttttttttttttttttttttggttttaaccacttagaaatcgaatacgtccatttctttgtaaaataacaataacgttaaaggcaaaagcaagattctgtaaaccaacattggaaaaggggacacagggaggggcagagggaaagggccagattttcaacggtttcctccacatctgcagacaaaggcccgcctactctttctattcctacacagtcattttcactctgagtgctaacaggcggtttgccttataaaatattcatgtgtcaaatattcaatgtacactataaacggttcttctcttgctgagtcttgagtgaaaacaatttagtagaaagaaaatccaatattccttcctgaagcctcacttaatagacacgggcacctgaagggaaggcagccttccagtttgagaagcctaggtctcatggtctagcgcagtggttctcaacacaggacgattttgtcttgtaaaggaggtgtggcaatgtctggagacacgttttgattgtcatgactcatggtggtgatgg

SEQ ID NO: 59016 - DNA, 479 bp, Homo Sapiens
gcctactactactactaaattcgcggccgcgtcgacttttttttttttttatcttaaaatatctagtggccaagaggtctacaatgacacactttgtagaaaccacacaggacattaacgtaagtttaccttctagtaattattttacaaatgtgttatttcaattagattacatattaagacactgctatgctgtaacagcactgggatgtcactaattaaggctgtaatagggcaaaagtgaactcctaataaatactgaattagagatttcttctacaagtctgtgagtttaagacaggttcaaaactaaaataagaaaaaaacactgaaaaccactttgctcacataatttatatgttaactaaaatatgtattgttcacaggttactaatccatttcaaagtgtagatcttataccaagaatatcacagaaatattttacctccctctgatgttaactctgataagctatggga

SEQ ID NO: 59017 - DNA, 532 bp, Homo Sapiens
ttttggctttattttgctttatcattttattggtaaaagttatttcaatgcaaaacatatacagagacaagtacacggtggtaaatgtatagctcaataaatctaatgaaataaacacaccaatgtaacagatcaagaaagaggacattactagcttccagatgccctatcatgtggcttcccagtttagttccctcaaggataatgaatattctgactattaatgtcatagatcagttttatcttctttgaagtttatgtaagtggaatcttttctgtctggtcaatatcatgtttccgagattcatctatattgttgcctttagttggagactgttcattctcattactggatggccatcctgtgaatatacttgggcagttaatatttgatcaattaatttcttccctcaagggtagctcaaaagttgaccatggcctccctacaccgtccctgatttcaatctgaatccacaggaagagtctcaccttactctaatgacttgcattgaatatcagaacacagaagtag

SEQ ID NO: 59018 - DNA, 578 bp, Homo Sapiens
  misc_feature (454)..(454): n is a, c, g, or t
  misc_feature (474)..(474): n is a, c, g, or t
  misc_feature (510)..(510): n is a, c, g, or t
  misc_feature (519)..(519): n is a, c, g, or t
  misc_feature (529)..(529): n is a, c, g, or t
  misc_feature (533)..(533): n is a, c, g, or t
  misc_feature (575)..(575): n is a, c, g, or t
  misc_feature (578)..(578): n is a, c, g, or t
gagacggagtcttgctctgttgcccaggctggagtgcagtggctaaatctcggctcaccgcaacctctgcctcccaggttcaagcaattccccttcctcagcctcccaagtagctgggattacagccgcctgccatcatgcctggctaatttttgtatttttagtagagatggggtttcaccatgttgtccaggttaatttcgaactcctggcctcaagggatccgcccacctcggcctcccaaactgctaggatcacaggcatgaatcaccgcgcccggaccagtgtaagcatttggtgtgctgccaatcaaggacttatttacctttgcatccctgctctgaggccagcacaatcctgtcacacagtaggtacacaatgcacatttgtctagcaaaaagtactggaaagcagaagggtggatagagctctgcctgggttcaaatccaggctntggcatttactaactgaaanctttgggcaagttggttaacctctctgggcctgttnctgactggngaaacagacngaanctttcttatgaggtggattaaagacccaatggaattaatatnccn

SEQ ID NO: 59019 - DNA, 2051 bp, Homo Sapiens
gagaacaacggaggcagaggagctgaagactccagtatgcaactgactacaaggaggtagtcgtttgaaaagctttctttccttctctgaactccttctttccctcctctcaggtcattgggtgaccccgggccgggcggagacaggtgaatcccaagagaggaggaagagggagggacagatgatggagggagaaccgcgtttaggcaatgaatgagcctgctgcatccgcaccacctgttccttccaagggtgccaccccgacctgccagcagggttcccacaccaaccgggccgcgactcctgccggtgtcgcccacttgcccgccaaaggccgggcctcttctcccccagatcggggagaatgagaaccggcagtctagaagccgggaggtcggggcctagtccggaaccagggcctcaagcgtggggatggaatgaagaagcctgtggtccctggcgcgcgggccatagtaggaaccacagagagggagcaaagcaatgcattcggcctgacgagagctatgaaggcggggtcccgggcgggagtggctcagtgcccgccgggccgaggttaggggtgacaggcccggttaccggctaaatcctccccaccgcttgcccggagcctcacacttaccaagatccgcttgaagagcgcattctccttgggcgggaggctcacggccggcatcgttccggctgctcccgctgctcccgccaccacccggctcggtcagtcagtttgtccgaccgccgccgctgccgttccgtagctgcttcagccttgaatatctcgatccgccgccaccaccaggcctcgggtgtcgccgcgttgccctacccggacacctcctttttcctcgttgtcttttttcctttctcacttaacgctgccgccgcctcccccactacgggtctccgtcggcggttcacgtggtaactgaacagaccgacagaggcagccaaaatggcggacgcggagggttttcccacccgggtcacgcttcctaacacgcaggcgcggtgacctcctttccccacctcctctgggtttcggagcttgccgggaaacctggaggctggcctgcctgtggaggccgggagggtcggggcaggccccgcccatcatttcagtgcgtggtgccctcgaagcgcccgcggagctacgggaggctaggcaagtacggttcagaccgcctcctcatcaaaaacagcctctctggcgccttcctgctagatcgacctttcattccttggaaagagtctcgcacactgtgtgatcatcgtttgagcccaaagtgctaaaatacaggtgtaggtgtttgagaagcgctgtagttgattatggacgaaatgcctaatttaaggagcagaggcggagtggaaaatgaaaaaagcttcaccgcagtggagacttgttaacagccctggggagaaaggggcttaacagagtctggaaatcgtgaaagagcttgaccgatgaaatgggcctggctgtcgtatcggtaatttggtgaatgttgcttaagatcagcctggaaaggtagttagtcagatccgaagtgacatatttgcactgccaaaggaggctctggaggttaaagtatgtgttttaatttcgttgttgaggccatataatgcagagttgacggaccgaccttatgagtcaccttggagcggagtagtggagacttaaagacagactaccctggagctggcttcaaactagttcttaatattgtgactcgaactccccatccccagaaattctcagatcttagaagccaaagactggcaaggatactagagggaactactcgagtaggcgaggtcagactacataccgaataggagtccttccaaaaatgtaagtcatttcattaacagctgaccgtaaaactttttcaaagtggcattcctttgatctaaaaattttcaagttatatgagccacttttaacctttggtttttgattacctctttccaaatcctgatttcactctgtagcattctttgcatcatgaattattaaacaatatgtgcgtgtt

SEQ ID NO: 59020 - DNA, 436 bp, Homo Sapiens
  misc_feature (129)..(129): n is a, c, g, or t
  misc_feature (150)..(150): n is a, c, g, or t
  misc_feature (233)..(233): n is a, c, g, or t
  misc_feature (432)..(432): n is a, c, g, or t
ctaagttcttgctcgctttaaagaagctgctactagaaattatagatcatgattatcgatgtggttcatacaaaaaaaaaaaaagaaaaatccctgggaaactccaatgagcaggtataaactcacgcntgggcatggcggctcagcacntttggaaggctcaggcaggagaatggcttgaactcgagtttaagaccagcctgggcaacatagtgagaccttgtctctgcaanaaataaaaaaaattagccaggctgggtggcacacaccctgtagtcccagctatttgagaggctgagaccgagaggattattaagaccctgggtggttgaggttgcagtgagccatgatcatgcctgagtgacaaggtgaaaccctgtctcaaagaaagaaagagagaaaagccattggctggtacacctagagactggnccag

SEQ ID NO: 59021 - DNA, 4018 bp, Homo Sapiens
ttttatacattgtatgatttaagatctttcagggcagacatttatacttggtaacaattgccaatttttttttctggtttttgttgtagtatttcaaaatacttcatcgacattgatagactcctacactacccctgggagctaggtaggtggaattatcatccaggccttctgtagggactgctgccacaacagagtggttgttcctaagacaaaggtcaaaaaaaggggtgttaataaacagtcctcaggtttaagggacttttttaggattacatcttaaattccaacaaatcagatttaggagttactgaaagtgaaattgatccatccctcatccaaactttgcaatactttcctgttctgacatcatttagatagttagctgtattatcagattagaaaccattgtaccaggctgctgaaaggaaaaggaggcaaaaagctaaacatgggatgaattctgaaccttttaacctggctgaagtacgttggtccctgttatgcaaataccttcaatcctctgctaagttcagtggaaataattttcttgaatgacaggtttattcagcaaggattcagttggtgattaatccccctttgatctagggtatttcacttaactaccagttacctcgttctgacaaagtgcaactgagattagggagatcactagaacactaccagggtgtgcgtttattctctataaccttttaaagcaagggccaagaatgcaatttattttcagtatttgaagatgtaaagtcctgtctgctaagttagaaagtcaattgaataccaaatgaagtttatttcttacgtaatagaacaaacatttctttttgcttcgcctaacaatgatattaggaaacataggctttgaagaaagaagaaacaaagactacattctaagtattgcttctagttttgtttcatgcactagggtatacttaactggccctgacataaccaaaaatcaaagcagtggctacaacttagactgagaaaatgcttctgttttattaagctgcatggtttcttctcacctttccccctaccaccaccaccaccattagaaaatgtcatactgtgtggtaaagaaatccagttgaggaaaatgtgttgcagtacacagttatccaccttaagactaatgatttcgaagctttgttaactatttcttttcttgaggcaaaggagcttcttgtgtttccattataagaataattgcattcattttcagaatgcttttttaaaaaaaaaagtgacagcattaccaaaatagccgagtaattaaattttttctgcctgcctttttctcagttatctgagtacctcttcttccataattttaaattttgaaatattatatggaattttgcacagtattttgagaaagaaaaggtaatgtttcatggtaggtttctcaatttgctgtttaaaactgtttcaatagcaatgtcagtcttcatcttgtaagatgtcaaatcaggatttattcctccagtatattttaagacctttaaaaaaaagtatagtgatttgttacaaaatatgtttttaaagattagattttgattaatgatttagttatatacagcattttaatgcttagtaattactgttctagtagcattttgcaatacaagggatgtatttagattattatactttttttggctcagactttttgtgatctaatttataaattgaaacaatgactcaaagaagtgcatacctaacttacgtttgtgccaagccagcctcctctagtttcaatttaataactagtttcaaaatatattttgatagcaagttcctaaaccacagcagaattgcggatcaggaaaaatacaagataacggcattctataaagatagagggcaggttcccatggctatgttgctaagaaactagtgtttttaatcattacactccgtgcagtcatatttaatcaataaaacaggatatattttgaaattcaccatcacagaatatatatatatatacacacaacatatatatacaagtatatgaatttacgtaaatgtgtacaacactagtgtgtctgacttggtgggtttccctgtgaaacatgtcagtatcatgtaagatgaagaatattttaagggcaaatattcaaatatctttcctccaaacacagtattagttaatagtaatgaaatgattcattaaactgaaaattgcaaaggaactcatgagttcctttgtgattgaaacaaagtgattaaaactcttatgacctgaaggctttccaactagcctccaactgtccgcaccagctgtttcatggatataacattagtgtttgtgtatagcctggaacaatacaaggctgtatctgtatcactagcttcttgccttataagcaggatactgcaaggtctggttgatttctctaatgccctagctaatctgcctaattgacatcagtgtcatgttaatgtatgatgcacaagcatttacagatggacaaatgctctacactaaaaaccacctgctgaattttttttccagtaggatgtgaaattttgcacttctaatctgttgaacatttaaagtcaaaactacatgtttcctttaaatggcctctttaaatgatattttatgtttataaattttgttatgaaaaatttaaaaattagttattcctcttaaatttttactttttccttcaaaggacttgggtgccctctgcaggttataaagagataattagtgactatatctattttaaaaccctgtgatttttctctttcatacacatagcctgcttacacccaatttcaaagaaagtgtgagctaatttatttatattaactcttattaatttgccagtggttgaagttggagtttcttttctccactggttttataggtgtgtttagtgtgaagaatgtgataccattgaacttccagactacttagctggggctctttaaatgttggaactatagtaacacacattccctcacagaaaggagattgggaaaatagctattttgaaagttattgcagatgtagggaatagcttgtttcccattatgtttctagaatattacacatttggagtaagccttgctttttcaacatgcatcatgtaaaattacatgaaagaaaataatttgaaaattacacaagatttctctttcttgatcttgttgatgatgattgtgttctagctcaaaaaacagaccttcttagaatttcttattttttaaaaaagtgagtactcaacagataatactttggtactgcccgttgcagacatgggcctactaaactagaaagagcatttgaagagcaaaaggcaaaggttccatcaccatcctgtggaaatacgtgagttgttcatttcagtacacccatagtttctcaacaggtgtagcagatttgtttctaaaggacataggagtgcattttttatatgaaaccagaactggagtggtaatggcacttctgattcaattaacttacttggtgaagctgccagggaaactaaatatgatgagaagaagaggaatgactggatcaaattaatagaaatagatctttttgcaagcaacataatgattctgatcatcaaccttgaaaagtaaattagaacaagcaaattgctgttgaaaaattctttcagcactctgctgttgctactcagctagtcatagctcagccagagggaaggaaaaaatgcactcggttttgcattaacaaaggaaacattattaaagtgaatgtttacattgtgtttattgaagtgttgaaagaatatttgttgcatcttcaagcaacctgctgctctccagactgttacagtgcatgagtgataataaaaatgagtcagtcacttgtacattttagaaaataaataacttttaacatagtatttctcaactatgttacttcaaaatgtttaagtgccaaacttaatgttaccttctctgctaaagatttttgtctctaggaaatatattccattaaaaaaaaaaaaaaaaa

SEQ ID NO: 59022 - DNA, 545 bp, Homo Sapiens
  misc_feature (9)..(9): n is a, c, g, or t
  misc_feature (24)..(24): n is a, c, g, or t
  misc_feature (31)..(31): n is a, c, g, or t
  misc_feature (109)..(109): n is a, c, g, or t
  misc_feature (165)..(165): n is a, c, g, or t
  misc_feature (379)..(379): n is a, c, g, or t
  misc_feature (408)..(408): n is a, c, g, or t
  misc_feature (459)..(459): n is a, c, g, or t
  misc_feature (470)..(470): n is a, c, g, or t
  misc_feature (479)..(479): n is a, c, g, or t
  misc_feature (502)..(502): n is a, c, g, or t
  misc_feature (513)..(513): n is a, c, g, or t
  misc_feature (521)..(521): n is a, c, g, or t
  misc_feature (537)..(537): n is a, c, g, or t
gagacggantcttgctgttaccangctggantgtggtggcacaatcttggctcactgcaacctgcccctccttgcttcaagcaattccctgcctcagcctccggggtanttgggattataagcacccgcaaccatgcctggctaatttttgtatttttagtaaanacggggtttcaccatgttggccaggctggtcttgaactcctgtccttgtgatctacccgcctcagcctcccaaagtgctgggattacaggtgtgagccactgcacccagtcaaaaattttttagtgttagatttgcaacaacatttttttttttaatgcatgtgcatcagtaacttttatgtatacagttttcaaatatttcattgtttctcancatacttcaactcattaaatctttcccantcttcccctgggcatgcatacatgtcaacatcagttcaatttcctgtccanggtacacaatnaaccctgtntttgggaacctttgaaccggtcntaacttacaangggcaacncctgttaaaaggtganacaaaaaa

SEQ ID NO: 59023 - DNA, 492 bp, Homo Sapiens
tcactgcatttcctgagtctgtaattattattattatgttttaaagagatgaagtctccctctgtcacccagtctggcatgcagtggtgtgattgtagcttactgctaccttgaactcttggactcaagtgatcctgctgcctcagcctcctgagtagctagagctgttagcacataccaccatgcccagctaatgtttaaaattttttgtagagatagggggtctcactatgttacctaggctggtttcaaactctggcctcaattgatcctcccaccttggcctcccaaagtgctgggattacagtcatgagctgccacaaccagcctgtaattatgttgttactgattttctgtcagttaattacctttagcctggaataccacgctcaccattgattgctaagcacctggagccatgtctgcacacaaagggtgctcaataaacactccttaaatgaggaatgcaggagggagtgaggaccagggccc

SEQ ID NO: 59024 - DNA, 343 bp, Homo Sapiens
gcgtcgacggggttgtttttgtttttttttttttttttggttgattggtcatcttaccaaagaatatgggaacatactatattcagagcctactgaaagactatgccatttttacagtagaagtcactggggaaaaacaatttgcttaataaacattcactttactgcaaactttaagggaatgcatccattacacaactgggaacaagagccacatgttcacatacacatatctatcctatgttactcgtgtgtgtgacggaggcaaaaaaaaaaagcagtgtttttactgaaataaaaatgtacctgttttgttgcagagccttgaaaaagaaaagttttg

SEQ ID NO: 59025 - DNA, 2060 bp, Homo Sapiens; identical to SEQ ID NO: 24252

SEQ ID NO: 59026 - DNA, 450 bp, Homo Sapiens
  misc_feature (324)..(324): n is a, c, g, or t
tgtagagatgaggtcttgctgtattgcccaggctgctcttgagcccctggcttcaagcatcctcctgtcttggtttcccaaagtgctgggactataggtgtgactcaccatgcctggcctacatccagtttaatttatactacactgtgggtttagtcctcaaacatgtttttgttttacatataaaaatttgaggtaaaagaacatttttacattggtcaataatggtacatttaaacaatggacgactatatccattaaaatcgtgttgtggaagaatattcagtgacatggaaagactgactcaagggcaagtgaaacgtngtcaagagtctgttaggtactagacactgtaaactgggtcttggctgtgttacttgcttacatcctccatcatgtgatcttttagataacaaaatcgagatacatagggataatgggtgggctgat

SEQ ID NO: 59027 - DNA, 1664 bp, Homo Sapiens; identical to SEQ ID NO: 24305

SEQ ID NO: 59028 - DNA, 2533 bp, Homo Sapiens
aaaacgtgatgatgggcagctagcttggaaagaatgcttacaacgtgaaaattatatatttataaaaggccattacttctgttaaagaacaatagaccccagtgaaaagaaaggaaattgaaaaatagagaaaatgtggagaaaactagaatctctatagacagcgtcaatgcagcatcaattatatgaaccacttttgagcacaaagaactattgttttgaccttggaggcaatttggtcttcattaggtttagctgtaggatagttgatgttcattattccctataacacttgtgatggcaaaaccttcacaaatttatatgatctaggtatgttttcaatccttacaacccaaataaccgatcataactctcactatgtcatttgaaaaaaaaaatgatcatcagaagtgtaattcaattagcaagtatcagtagtggagtataaattattattggttaatactaagtatgattgaaaaatcgtagtagatggaaatatgggaatctttattttggatgaataaactttatgcctaaaacatatgtttataaaaaatactttgtgaataaacccattgtctaatatttaaaagagttgaagtatgctattataagatcttccttaattgatgaaatgatgcaaagccaataatattgctccacttactgaagtatagagatgaagagaaaactttttctttattccatgttctatataagtcaagaactagagctcaagattaagatttttgttttttgttttttttccatttccctgggaacagagcaacagtctttctgggtctaaaacatccttttttcagtacaccccacagcatcctatagaaatatgttgcaatcagttgccaagtcacatcctagcttaatgtcagcaattttctttctgaaccaattttgcactcagcattaagaggaaatattgaagggagacataccttttatgtttgtaaaatttatacttcttgagataaaaaagcaactatatccattgtcgtgggatcttgagaagaaataagaaaatgaaatattatagaaaatattatattatttaattgtcctgttctaaaacactttctaagcctgcctgtttttttgccaaattaaattaatatttggatgtagacagcttttcagagtggcagtatcatagtcaatgaagatgacctgaggcacagttattgctaattggacatagaaaccaccttcactcatatataaaaattattatgtgctacactagatatttcaggagaattgataaaagaaagactgttgtattcatatgcttgtcttcctggctagaggatctgttttaattaatcagctcatggagtttggaaaatatttatagtatacatagctgagtgttcatgtaaattttgaatacattcatacatcttttttttaaaaaaagattgaacttcaaaaccattttcttacatactcagtagaagttgttatgagccaacattttttgtgagctatactattttaaacatctaaagtaaattatttgacatataaaaagacttcttcatttaaaaatatatcttttaaaaataattttacaagtgatggcatctcattttagaagaagaggcatcaatgacagcagttacagtaactcgatgctgaatatgtttttaaatacaagatgctgtgttcagcattgtacatacattatcaaattttattctgataatatgctgcatgatgtattaggctgggttctctcagacagaacctacacgtatacttatatatatatacacatgcatatacatacacatacagagagagagaaagagagagagagagagatctctacatttattagaggaattggatcatgcgattatgggggctgagaagttccaggataggttgtctgcaagctggagaaccagggaagagagtagagtagctttctccaagtcctgaagcttcagaactagggaaactgatggtataactctcagtcagaggccaatggactgagaactcagacagccactttgcaactcctggaatcccaaggccagagagcctggagtttggatgtccaaaagcaccagaaggagggtgtcttaggtccaggagagagtgagctttcctatgcatttttgttttatccatacccctgaccaattggatggtgcccacccgcattgagggtgggtgtccctctattaaatattttaactataattttaactgtgatataggcactgaattcttgttgctaataatctggtaagatccatctgaactatgaagtgagtacctggaggaactcctacattttaggctttcaaaggttacaggcttttcgtgtgtgtgtgtgtgtgtgtgtgtgtgtgtgtgcgttttgagaaaaatggaattcaaacactgtgattagaatgtatgtttacttatatagaattaatgaatgtatataataataattactgtatataattttaaaatataataaagtcctcttttaccaaaaaaaaaaaaaaaaaaa

SEQ ID NO: 59029 - DNA, 421 bp, Homo Sapiens
  misc_feature (3)..(3): n is a, c, g, or t
gcncgactttttttttttttaaatcaaacccaaaacactactgtcctaagcattatggttcacagaatcaagtgaaatgtatggcattttttccttctctccatacaagggtactctgatcaagagctagtctatcaactattgatcaagcatttataatgacaagagtgtaagagtaactaactgcagggttacaaagtatgttatataaggtccaggggattttccccaacagtgtagaactgattggaggataatagtaaggttcttgaattggggaaattccattcaaatgataatcctcaccagtccatggagcttttaagcccctaagcagccataaacaaaagcccacttgacaaagagatggtatgcttggttaccataggacatctcactcctctggcctcattgcttagat

SEQ ID NO: 59030 - DNA, 3563 bp, Homo Sapiens; identical to SEQ ID NO: 24407

SEQ ID NO: 59031 - DNA, 2033 bp, Homo Sapiens
tttggttaattatttttatataatttcttgaactataatcttttgaagtggatttaaatgttacagacgtgttatgaggttttagccttaatcatctcatctatgccccccacaaccccccaccagtgctagataactttaaacaaacagcttactagttccctgatgagaaccaataggtcatgtagtaggaaccaaaagaaattggggatcatcgtttttactatcttttgaagagtgaaataaaagaattagatttttttttaatggaagaggactttaatatttattccctctaatcttttgtttttattgctaagaaaaaatcttgtaatccatacttcctgatactcagtttttttagtgttaaaacccatttgcctatgcaattataagtaaataattgaattattggcattcttaatatctcttcacttaaaagtgttaagagtgttgtcaacttgttagcaccaactttttgtataggtctttatcttatagtgatctgaaaccgtaattataattggctgtttcagtataggaagaaacacacacacactcatatatatatatcttcctcataatttaaaaaaccgttttgaaataattggaatagttgtaaaagtagagggagtaataattaaaaagagaagtcttcatttttttttccttgtcaaccaaacacagacatttttacctatatcacacagcaagcccttacacattgctggcaagtgttaaagtattcaataatttcaaatcgaaacagagtcttagatcagttacatcttttttttttttttttttgagacggagtctcgctctgtcacccaggctggagtgcagtggcaccatcttggctcactgcaagctccacctcccaggttcatgccattctcctgcctcagcctcccgagtagctgggactacaggtgctcgccaccacacccggctaatttttttgtatttttttagtagaggcagggtttcaccgtgttagccaggatggctaactgacctcgtgatccatccgcctcagcctcccaaagtgctgggattacaggcgtgagccactgcgcctggcctagttacatctttttagtcttgattcagagttgtggctattcaggcatctaatctgaagaaaaaatatttgagctcagcatcgtctaatcataatagttttttttaaatttgctaattattttatttaaagtatatttaagttaaaaagcattaagttcaaacgtgcatgcttatattttaaactgttttccattcatgacatgccaaacttttcctccccagctaactttgcctttctcattaacagaattatgttttaatggttttcattgtcacttgatgctgtggccaaggaattgaaacttactttaaatgataattaagtcaaatacaaatacgttttgaattgttatactgctttttattaccacaggcactctagagctgagtttatgttgtgctcagtaggctagtctctttttctctactaagttaatgaatggtggcctggacttcagatggctagacagttatgtgcagtatctggagggtgtgatgaagcccagaaatattcccagtccttgaatttcgctagttggtaaaatgcgagctccgtttacccttgctaaggctgcctctgcagggtctctccctttataccttcatacccagtcccccaccaagatgaatgctggctggggagcagggctgcctccaggtgaaggtgtcaccagctctggtggctttggactccaggagccacaattgtgtgtaggcactaggcttctgttgggtgtttggatggtgcatttatatttacccacggtaaatataaatttacctttataaatttggtcaagcttcatgccttgcaaaataattggggtgactatatgaggacagaatactatatagtgagccattcaagtgccacttaagtgcagatgtttaagaagatacataaagtgatgaaaatgaatttaacttgaagaaaaaaaaaaaaaaaa

SEQ ID NO: 59032 - DNA, 1019 bp, Homo Sapiens
cagcattttttccagaacacaaaaggtgccagaagcccaggaagcacacatcaaggctcacttgccagcggggtgctgccaataaaatgtagtcacgtggaatttggaatgtggaaaggaggtagaagtcatcctttcctcccccatagcagcaggtgtgcaggctctggtggtcagctggactccatactcccccaccagtcaccagcctggggaccgtggggctgcaaggacctcagcagcggtttcccaagtttcctgacttcttccatcctctggaaatcagctgtggttcgtgagccacacatctccccacaccaagctcctccatacaagacctcggactgcatcacgtaaatgctttttcaggggcaaaatctagagaatctgaaatgagctatcagcttcccagtttgcacaattcatcaagaaattatgcggggtcactggcacaaatgatgaggcatctcctggaagcttaacttcttatccatcccatctcttggacagatgatgccagttaattactttgaatgttctatattggctgtgatctttgtactaactgctattatggagaatgtgttggcatcgcagaaaaggaggctaagaaaatggatgtgtacatctgtaatgattgtaaatgggcacaagagggcagcagtgaggaattgtactgtatctgcagaacacctgcagtcacagtgagttctaataagagcatcacatttaataatttaggaagccaaattgctctgactggttacttatttactttaaaataaaaagcagattttttctacatttgttatacacttacattacaaattccttttcatttttttttctctttttccctttttacctacccttcaaaatttatcttgcttcatagtgaatgtttgagacacattggggaaaatgtggtttaatggtagatttgattcttcaatatgtaacatagaaattaatgagattaaactagcttgacttgtttggactttaaaaaaaaaaaaaaa

SEQ ID NO: 59033 - DNA, 941 bp, Homo Sapiens
taaagtttgaaaacaggagaaatgactgtacaccattagaagccagaatggacattagcctttggagccaggtagtaagtggaaggggtaccaggggttgctggtgatgttctgtttcatgatttggatgctggttactcggggtaaattcattttgtgaaaattcactgagctttacacttatggtttgtgcttttttttttttttttgcatatatgtcatccttcaacaaacacttaaaaaatgtttgaaaaccccatcaattcagtcagactctttgggtgggagcaagaaccaggcatcagtattttttaatatcccagatgatggtaatadgcagcsaggatttaaagkcactggtttaatatcttgggaaaagcagatccactcaagacctcacagggtcctgacaaaggccacttccagcycagtggagtgagacactggggtgggaagatgtccattttttggatgtgggtcagtctcttgcacaggcagaggtattgcagcatgctgttgtaatgtgtatcttccttggcagtgtctgttgaaagctggttgcatcagtttgtaatggggtgtaatggcaacaaggtgggccvccccccccaggaagtggatmactgagcacagcttctacagggccatttgtagagaggtggcagctgggcttcccaggggctgccacccagggcagagccagtgctgaggctctgacaacctcggcagggtggggagaaggccagactcagggtgtttatgtttgtgggtaatgacagtcagctctgggctccagatgatgcttactccctggcctctgtgttcagattaggaacttgcaacatcttgctgaggaccatgtsaggctcagctctaagtgctgtggctgaagaatttcctcctctctgtgtggtwagtggcagctccctagcaatggctga

SEQ ID NO: 59034 - DNA, 1985 bp, Homo Sapiens
tctctccagctgcaatggaagacttgtctcttccccttctgccataattgtaagtttcctgaggcttccccagccatgtggaactatgaatgaattaaacctcttttctttataaattacccagcatcgggtatgtctttatagcagtgtgaaaacagactaatacagaagtatatgttaactttctctgctgagcatgttggtgcttgcctgtagtcccagctacttgggaggctgaggtggaaggatcatttaagaccagcctgggcaacatagggagatcctatgtccaaaaaaaaaaaaaaaaaaaaaaaaaagcatgttaaatttttcatcagagttgacagcttctcaaatggtcagtttttgttatatacattgttgaggctgtgtgttagaaactttcagattcatgaacattattcaatgttctttgtagtttgttccttttattgtaatatagtctctatccctattaatgctttttcgctactgatacctgacttttttccccttaatctttgacttgtaatatgtgagattaatctatttgaataagtagacttatttctgctctctgaattttatattttctgatccatttactttgctgtgtgtgtgttttgtttttgtttttgtttttttttttttttgagtctagctttgttgcccaggctggagttgcacgatcttggttccctgcagtctcagcctcccaggttcaagtgattgtcctgtgtcaatctcccgagtagctgggactacaggcgtgtaccaccatgtgtggctaatatttgtatttttagtatggatggggttttaccatgttggtcaggctggtctcgaactcctgacctcaagtgatgtgcctgccttggcctcccaaagtgctgggattacaggcctgagccaccgcgcccggcctctttgctgtttttttcctcttctgttagatggttagttttctgcactcctttttttccctccctcttgattcgaaagtcatagactatatttccattattttaatggttactgttaaaattttcagttacgaagttttctactaaaaatgtgggcctaactggcttctaggatgaacccagctctggcacccagtctcttttactctgtttttcttgtgtggagatactcatcttgtatctcatctcagctttgtcttttggttttctcttttttacagttgcctttcatagctacatatttagagtaggagaagtcttcctcagggtgaactcaatgcatcatctctacttcagccattctttcactctactggtttgcatatctgcacataatattcagtaaatacttgttaagaagtgtttcttatatttttttcctttttgttttagttttactcacttttttcagcttttgatggaaaggagagaaagtggagataacaggaccaaccacatctgtagaatggtttttacactgactgtcgacaatcagggttggtggagtggtcagggtaagaaggaggtatagagaatttagtctgggacaaaggaactgtatggtccaagtgtgaattgacacttattatgacaatattatggcaatattatttattgataatattctaataagactgcctccattttgttaggtttgttttctgtttttatacacaccgaagtattaaatagatgccagttatttttgtagaaaacaggagggctacactgctgtattgtagctatgatgatggcgaccgcgttttacaaacatttgtgttctcctaacatagtgattaattactaggacaggtttgagatggtggcagttacaaagagcatctggctggagatgagtttagtgttcgcatatacccctactcactcctccaccatcttcccctttcagaaaccgagagaggaggtagctgatgataccaataaacttgttatgctttgagatgtatctctgtaactagcaagtgatttccaggcattttt

SEQ ID NO: 59035 - DNA, 2894 bp, Homo Sapiens
gtcatggagtgtctgcacgggacgtcctggagagtcggacacgtaagcagcacagtgaggccaccaacagcagcaaccgagtcttcgtgtactgcgccttcctggacttcagctccggagaaggggtctggtcgaaccacggctgtgcgctcacgagaggaaacctcacctactccgtctgccgctgcactcacctcaccaactttgccatcctcatgcaggtggtcccgctggaggtcaacattggcatcctcatcgctgtgaccagagtcatctcacagatcagcgccgacaactacaagatccatggagaccccagtgccttcaagttgacggccaaggcagtggccgtgctgctgcccatcctgggtacctcgtgggtctttggcgtgcttgctgtcaacggttgtgctgtggttttccagtacatgtttgccacgctcaactccctgcagggactgttcatattcctctttcattgtctcctgaattcagaggtgagagccgccttcaagcacaaaaccaaggtctggtcgctcacgagcagctccgcccgcacctccaacgcgaagcccttccactcggacctcatgaatgggacccggccaggcatggcctccaccaagctcagcccttgggacaagagcagccactctgcccaccgcgtcgacctgtcagccgtgtgagccgggaggctgccaaccaggccaggctgcgctcagaacacacccccccaaacagaatgaaatgccccacctttgcccatggaccctctccttgctgctgtctggacatgggtgttgtggccccgagacagctgtcctcccctgtgactctggctgtcggagcacactgctcagcccagcagcctgatgcccaggccagcgtgggccctcctgccttgcatccacccgtgggctgagtgacttcctcgggggattcccaggacacagtggcctgactgtgatggtgcccttgagcctcccttcatcactcagcatcagacccagcgaggccaggacactcggggccggtcccgcagcaccaggaggggatgttcagcctctgtgccttggtggggcttggggactcagggccaaagaggtggttcaggtccccacgcaccctcagtcaggcgcaggcagctgggggtgtgtggggaagagcatgcggagtccccagtgtctgaatccactgagtggtgagttccccacagccggcgctagccgtggtgtgtgtctctgtaggtggtgccggcgtgggccaacctgtgctgtgtcatcagttgggggcccctgcccaagccgagctcgagccgtgggcgggagtcgttgactctccaggtgagggcgacccctctgccctgtccttgcgggggtcccctctgctcacgtgaagagccgctctgggccttgaggctgcctgatggtgcctgtgcttgggggagcttctcggccatccgctgtgagttttgcctctttggaccccaattcggccttaagatgccctcctccctcgtgtgccagcctccttggttgttcttgggccacaggagctggccgtgtccccgcagtgcctggtgtccaggtggaaagtggagggcattttccagggcactgctttccccagaggcttcctcatggctcacaggcactctacgaagtttctaatgggcagaccacgcggcaggtagcacagtgcgctccgtctggtcaccatgagaccgacctgcgctgagtccccactgacctggagagggagggctggtgacagccgtgtcttctgtgttgagggaaatttatggactcagactcagccccagaggagatgggataattgttatggacccatgtgtgggcatgatcctgtggaacacaggtttgggatcatagatgtgaattaagacaccaccgagatacgggctgtgaggttcatactgtgctgatagcactcgtggtgtctgtgaaatgtgggtaagacattcaaacctggttttgatactggaaactcttcctttaaaactgtgaccatgatttcattcagcccctccacacccctatgtctgccttgtttcagagtgagttttctatggagcctgtggcccttttgcagcccacctggtggcttcttaatgtaactcttcccctggtcgcctggagtggaccactcatctgcaggcctctcctgcatggggagggtaggcagggagcagcatgtctgcaggggtgaacctttgctcttctgtcaggcgaggcccaggctgcaccagccacctgccacatggtgacagtgccacgggccctgcgtatggcccctgcaaccgtgctctggcgggcacacctggctgctgcaggccaaggccgctgttcagtgaagagtcccatgtttagtatggactaaagtcccatgtttagccactgccccaggctcccgtgaccccagaaaccaggtcacatggaccacagtgccagatcctcatcacgccggtgagcacctagaagtgagaacactgtattcctacaatgtacacttggatatttctccttatttagtttctagtgaaacaaatcaagtaaggaactatctttagtttagatggaattatttgtttttaattgttgccgtattcatctatatagctaatatttcaagataagtaatgaacaaaacctgtctaaaccttttgtttccaatgaatgaaagtcatgcactttatttataggctctatgttttggcttctgcagtacttttattatctatacataatttggccaaaaataagaaattggaaagaatgaaatgtttagtttatagtagaagaaagatgatgacactaagttgtgaaaatatgttgtgatttttatgaaataaactcatgtcctgaaaaaaaaaa

SEQ ID NO: 59036 - DNA, 407 bp, Homo Sapiens
tttttttttttttttttttttttttttttttttttttcctaggggaacatgttgcatttataaagaaatgtcacacgtacacacagaaaggtcatatcaaagcaggtaaaaattaagacaacatatttctccaaaaaccagtctgacatcttataataccagaaatatacacacacttcaaacctgggaaatcatcctatgaatctgctctgaccaatatggtagccactaatacctgaaatatggagtaaccaagtaacaaatttttaaatttaaaactgatactcatttcagttattggaaaacttttaagcacatttagaccaacatgggtatgtaaatttactttgcaaatttagattttatgaaatctaaacatggattaagtattatcagtaaaactttag

SEQ ID NO: 59037 - DNA, 3032 bp, Homo Sapiens
atttagatgtcgggggcgggggagggtggttggcggcgggagttgctgagagggccggccgcttatccctgtttggtcccacttttctcccagcacctgcccttgttcaccgcctcttcatctacttggatttggctcgaataaaccctcagctcccggccagcgctgagagccctggcggaagagtgggtagcggtggccttaagtattaaatctgagcctgcttcttgggggagagactcgttgaaaagggagtgtgttgggggggtgttgtgcgctgaggggagttagaacttcccggtcggttacccagtgggaagctgcggggcacaaagcccagaatttgctgctaatcgctgggtgccctggagacagagggggcgtgtcctctgcggattccattctcaccttcccctcccgcttctgatctcgctgtttgctccacccttgctccccacccactatcagctccagcgggtgggggtgaagggctgtccccaggccaacacctccttccaggctttggggagtggggattctttccccggatgggcagagttccttctgcagtggcgctaccgtccgtgctgccctcctggaaacaccggggtttggggcaggaacacttcacctgaaagcaggcctgcttggcgcctcccggcacatctgtggtctcctctgcacgtcgctcgcgcagcctccttgcctggaatgtccttcgctgcccatcctcataggcccacctgggagagatcatatccatgccccctgccccaggtttgtgggtcaaggactggcactgtctggtgctgtagcactggggcacaggccaccccccctgcccccaggccctgcttttcgtgcaacccccaggcacataatggccacccagctaaggctctacaagcgtaagcctgagcctcccaggtggacaaggacagaagtcacctgggggctcactcctggtctcatcggagaaacctaggcccagagaggtgggggtactaaagcaaagtcacaccacatgctcctctgatggccagggtgagcctgcagtcctctcctctcccccttactccagggtgctggggtggcccctcaggacagtgaactgactgtgtcccaggctccaggtccctggcacagctggggtcacactgacagcctgcccagaggcaccccaccttgggacccgtaccccagcagcccctgcctggctccttcttggggtgcccccaacctacaggctcagggcagataatgccagtgcttctccttggtggctggggagggggactgtccaccccctactattcgcctagtgtgggtcacgtgttttaacttctcagggaggcggggccagcatcttgactgacagcatccttgaggccttgcatggtggaaggtttggaatgcctccccctctcccctactgggggatcaacccaaatcttgaggccacatagacactgggctctggatggacagaagcaggcgcagagagaaaagctcagctaggggtgggagaacccgggaggagaggtaaccccaagagggaagggtgcctcttccactacctctgctaccagccatccccaggacagtggttcctccccaccccgcccagccctgaggactactggttggggattgcctccggagcccagcttagggaggacagtagacagtaggctttggagttgggagacagggttccgcttctgctggtgtgactggaggcctcctcgtgcgctcagaaaggtggtgaggaggctcctccaatggaggccggccccacagcccacactgttcctgaggatgggttcttctgggtgaaggagaccaagcccctcgccgaagggtgctgaaacaagtcagaagagaaagtgggaaccagtgcctctcctgggagacttgagtggggccttgtgggagtggggcctcccaacagaggcaagtggcgtaagggtctttctgctctctccctcccacgccttgctgctgttgctgtcacctgggcaggtctggggccagaggcgtgaccatgcacccacaggaaggggaccccacagctggacctagcttcaagggacatggaggggcctcgaggggccccctgctggagggagaagtaaagtccagtggcacatcctgggcaagtgttcagtttccaaaaccgagggaaatccagatacttcccaagaaaagaggttctagaacgaggattttcagctttagaaaattaaaaagctgaagtggaaaagaggatggatttcctgtttccaggatgcaaaggcctcccagaaaatcagaaacccaaatggaagtcatgaaagaaaagataggcttggtggttgcttcttcattcacctgtgaatgttataggctctggaagaagaaggaacaggtctggagatgattaatatgatgaataaataatagtggaaattttccctgatcagaagagggcatgagtctgcacagtgaaagtgttggtagagctccaggcagggttactttaaagaaaaagacacacccttggcatctcctggtgacattcttgaaatccacagataaaatctcagcgacctcccacagaataaataaaccattgacaaaggagaaaaaaaaaaaaacattggcagcagatttctcatctgcagcactgaaagccagaggaccaaggctggcctgggcccaggattctcaaccagagcattcatactgttccccaaccagattaagaaatagattttgagccgggctcagtggcttacgcctgtaatcccagcacttcgggaggctgagatgggtggatcacgaggtcgggagatcgagaccctcctggccaacatggtgaaaccccatttctaaaggtatagaaattagctgggtgtggtggcgcgcgcctgtggtcccggctgcacaggaggctgaggcgggagaatcacttaaacccgggagacagaggttgcagtgggccgggatcgcgccattgcactccggcctgggtgacagagcaagactatctc

SEQ ID NO: 59038 - DNA, 3190 bp, Homo Sapiens
ggcacgaggccagacaccccccaaaatagactacctgcttccaggtcctgggcctgctcactctccccagccctccaagagggcggggcctctgacacccccaaaacctcccagaaggagcgactccattaagttccagcacaggctggagactagctccgagtcagaagccactctggtgggcagctccccatccactagtcccccgagcgccctgccccctgacgtggaccccggggagcccatgcacgcatcaccccctcgcaaggccagggtccgcattgcttccagctactaccctgaaggagatggggactcctcccacctgccggccaagaaatcctgtgatgaggacctcacctcccagaaggtggatgagctggggcagaagcgtcgccggccaaaatctgctcccagttttcggccgaagcttgctccagtagtgattcctgctcagttcctggaggaacagaagtgtgtcccggccagtggagaactctccccggagctccaggagtgggcaccttactcgcctgggcattccagccggcacagcaaccccccgctataccctagcaggccgtctgtgggcactgttccccggagtttgacccccagcaccactgtgagctccatcctgcggaaccccatctacactgtgcgcagtcacagggtcggcccctgcagctctccacctgcggcccgagatgctggcccccagggtttgcatcccagtgtccagcaccagggacgcctgagcctggacctgagccacaggacctgcagcgactactccgagatgagagccacccatgggtccaactcactgccctccagcgcccgcctgggttcttcgagtaacttgcagttcaaggcggaacgcattaaaatcccatcaacaccaagatatccgcggagtgtcgtgggctccgagagaggttcagtgtcacattctgaatgcagcactcctccacagtcacccctgaacatcgacaccctgtcctcttgtagccagtcccagacctcagcctccacattgcccagaatcgctgtcaaccccgcgtccctcggggagcggagaaaggacaggccttatgtggaggagccacgccacgtgaaggtgcagaagggctcagagccgctgggcatctccatcgtgagtggagagaagggcggcatctacgtctccaaggtgaccgtggggagcatcgctcaccaggctggcctcgagtatggggatcagttactggagttcaacggcataaacctgcggagcgccacggagcagcaggcgcggctcatcatcgggcagcagtgtgataccatcaccatcctggcccagtacaacccccacgtgcaccagctcagcagccactcccggtccagctcacacctggaccctgccggtacccactccactctccagggcagtggcaccaccaccccggagcatccatctgtcatcgacccactgatggagcaggacgaggggcctagcacccccccagccaagcagagcagctccaggattgcgggagatgccaacaagaagaccctggagccacgcgttgtcttcatcaaaaagtcccagctggagcttggggtgcacttgtgtggtgggaacctgcatggggtgtttgtggccgaggtggaggatgacagtcctgccaagggtcctgacggcctcgtgccaggggacctcatcctggagcctggacgtgcggaacaagacagtggaggaagtctatgtggagatgctgaagcccagggatggcgtccgcctgaaggtgcagtaccgccctgaggagttcacgaaggccaagggcctgcctggtgacagcttctacatcagggccctgtacgaccggctggcagatgtggagcaagagttgagctttaagaaggacgacatcctctacgtggatgacaccttaccccagggcacgttcgggtcctggatggcttggcagctggacgagaatgcccagaagatccagcgcgggcagattcccagcaaatatgtgatggaccaagaattctccaggaggctcagcatgtctgaagtcaaagatgacaatagcgccacaaagacgctgtcagcggctgcacgccggtccttttttcggaggaaacacaagcacaaacgcagcgggtccaaggacgggaaagacctgctcgccttggatgccttttccagtgactccattccactctttgaagattcggtgagcctggcctatcagcgggtccagaaggtggactgcaccgctctgaggcctgtcctgattctggggcctttgctggacgtggtgaaggagatgctggtgaatgaggctcctggcaagttctgcagatgtccccttgaggtgatgaaggcctcccagcaggccattgagcggggtgtcaaagattgcctgtttgtcgactataagcggagaagcggccatttcgatgtgaccactgtggcgtcaataaaggagatcacagaaaagaaccgacactgcctcctggacattgctccgcacgctattgagcggctccaccacatgcacatctaccccattgtcatcttcatccactacaagagcgccaagcacatcaaggagcagagagaccccatctacctgagggacaaggtgactcagaggcattccaaagagcagtttgaggcggcgcagaagcttgagcaggagtacagcaggtacttcacaggtaggtgtgcgtgggcctggagtggggagcaggcagcagggaaggaagcagaggcttcctaaggctgttttcttagccgtggagaagcccgcactttctacatgctcccaagtgctgtcatgagcacgttcctgacaagtcaggtgttcagattgcagtccctggccaacgtcaggattcttacaggttgaatgttaagctcaccgatcttggcctcaggtcctgcctggcttgcctgctcattttcacacgtgcagtggtgggtctgtctcatagcacaggtgcagtttagtgcagccacagtgtccccaggcagggcggggactggagcagcccccagtgtgccagcagtgtgggcagcggaggctaggggcccatctgtccctagcaccctccagggcagtcccgttttgcagcgggatttggcaaacccccctccaaaaaaaaaaaaacaaaaaacaaaaaaaaaaaaaaaaaa

SEQ ID NO: 59039 - DNA, 3793 bp, Homo Sapiens
aaagcacagtttcagcaatggctacatgactatgtctaaaaactgaatactcagaatactaaaggtttggtgcttaaatttatttttcccatgccagagaaagcaagctttggtatggtaaaccacatgagaacatggctcctttctttttggatagcctggccatgtgtgaatgggattttagcttattatgtttctaagacttttccttacagcacacttaatgtaccttttcagtccttctcccaaccccctgcaaattgtctttaaaacaacaacacataaggaatctgaagcacaggagaacacagagccaacaaacagaatgaagaacaatcatctatttttaactgactttctatcattaccatttttccttttgcttaataactatcttgctttgaaactttgactccttttataagttctatgaggcacatatgtatagcaatttggttctaaaaaccagtgatcttactttagctccatcttaaaatttcaccttaagtaaatggcctctagtagatgataagcctaaaaaaagcacaattattaaaacaaacagatccatgttaggacatttctgaataataaagagaaaaggtgtttcgttgggtattgcagaaaagaggaccaatttcatatagtacaagtttcgtaagtcaggccaagtgtcaatttcaaaagacaagaaatgaaattgacagtgaatagtgctcataaattggtagcgtatataaagagaagttcctgtcacattatattcccactagaattattatccacagtaaataaatattattttgttatgccaaaaatatagcgagcagcttcatggttaataatacatttatgttgacacctccctaatccaggaaacattcacaaacaaggactcccatatacaaatactttaggaagagagatttcccaggcagatatcaccaaaaatgttttcactgtaggaatcacaaaataagtttttgtcaaaataactgttgttgaacgttatactggtcttcctcactggtgattgataagctcctttctagccagtttgtggtacttccttcattttccctagaaatgttacttgttaaatgtgtcctcaggcggtttcatctttgttgattctgcccatctaagtcataagcttctcaaatgcaagctactagctagttacacttgtaagttttccataatgacatgattttaaacataaagagttcataagaatcacttggagagactatttaaaaatgagattcctaggcccacctcagattgtgataaatctgtgtgactgactgatgcagactttttctggactataataactgatgctgctctactgctttaatacaggccaaagtaacgtggaagcgcacagcagaaaatcttcagaaagacatcaggtttgttctgattttgacaagggtaacttcttctttattaaagcaaataactggacataatcttaaaggattccacctccatcgtctttcctaacttagatcttcattgagaaattgggcaaggttaagtttacttttttctagtgctgcggttttggctcgtcttggtagtctcatcttcatttctgattctggttctggaacttcatgatcactaaatagatgttgaaaatacacgaatttagatacaagctttaaaaccagtttatttataaataaaacttttttgtttctgactcacattctatcagtgtttaattgatagcctgattccattgacttagcttaaaactaaaatctcaatgtcaaaaaaacactgacttggctatctagcaaagtgaatcagggaaaatctagctaatgattttatatactataacagaacctggtgttatacaggaaaaaaagccacaaacttgtaatgaagcttgtaattaaacgaggaccataactgtccaaaagagatttctttgaaactcaagaagtgacaaaaaaattaagttctctctcttgatttaagcaataaattccaaaaacatagtaaaaaacaagtttccccccaaaaaagacaaatttaatcaacagtgtaaaactatgtactgaaaatacacacaatacaattttgcaaatgaatacaagacagctaccaactttcagctctaacagtggcttgactgacagaagccaaaaataaaacactctaccacacaatatacccaaattatagacagaattattctatcagtatgtaagtgtagagaacccaaatattatcaaaatcaagagtttgctaactgaagatcaaagaggagtcacatcatgtaattaaaaattgaaacaacatattaaagatagtactaaagaccatgccagctaataggcaaaagcaaacacgccgtaagaagtcaaatgctcttgatgatggaattttagactatatacctaagacagctatttatagttttcactatcttgttatatattctctctcattcgcaagaaaattagtttttttctacttgtagaaataaaaagtgaagataggcctctatatattctagacatgcatgacatacctttcagagtcggcttcagcagtctgacacctcctgttcgtcctagctgaaactgtcacttttctctgtccttgaagatagtataattcattatcaggatttattatcagttgctttttgtttttaatctagtttctaggctaactaaatcctttgtcttcaacacaacaatcctttcaacacatgtatctcctacttgttctagccatcttggtaccagttatcactgccacagaaaaaggaacccaagcaagattaaaacttaatttattttgtaagcactaataatgagtaagggaaaataaggaaatttcaagcaagttaaaagaaggcaaattttagttcaatgtatttgaggacagtatatgaaaaatgtgttataatgaagtacctctattattgctatagcacaaagtctgtggagactcatgaaaattaagggttagaaaggtaggttaggtgcataaacaggtgctaaagaaacaacttttttttttcttggaaggtgataaaacatagtaaggtaataatggcttcttgtaaaataacatacatgaccaattcaaatgtgttctaaaatatatttcaatgtaaaaactagaacctttatatactggggattataagattctacttactagaaatttacaaggttaaggagtaagacaaagtttggcttgtgatgtttctcatttataaggaataaaacaatatgaatatatgaagtttggtctattaaaaaggatggtgttctcatggtgtgatataccacaaaaaaaatctgatcaaaaccaaactgttcaatgtgacagtctgaaaattatatactctacttcattcatgttacacttttttctactccttacctgcttttactaatgcatttatccccaagaaaacatccaacaatatgggactaatttggaacaatatccagcaattggtatttaaataatttactggttacaaaacaatattatgaccagactccattttagaaaaaattaaatctgcatcgaaaagggccttaaaaaatagatttctaaaatcaaaatcatggttggctcatgggtgggattattagtgttccttatagtagtttgtctggatgtactttctgattcttctgtaataagcatgcattgcttttgtaatgaggaaataataaaacaataaaaagaaaaaaaaaaaaaaaaaaaaaaaaaaaaaaaaaaaaaaaaaaaaaaaaaaaaaaaaaaaaaa

SEQ ID NO: 59040 - DNA, 2258 bp, Homo Sapiens
agaaatatcttccagaggcactaatagccgactttagttcttgacctttagctagatccacaaagcactgagttaaaattgtacactgatcccttccagaacaaattaattaattaaatggtgcctcttcccagcgttaatcgtttaaaaggactcaagtacccacacagtttaagcaaactaaaagaacactgacactttctcagagaacagggatgggaactttctatctgcccattagtatctaccccaagctacgaagacttccattcctcttattaagcattcagcaactacatttagtgcctactatgccagtgatgcaagaatggataagacagtccctacactcaaggataacgcctctagtaggtgagagacaaaccgattaattctgcataagggataagcgctgtatgtgggaagcaatccaatgagggctctgaggatggcaaaggaagggttcctggaggatttacatttaactggtgccttgaaaggtgtgtagaagttggcaagatcaaaagggagtagagtccaggtggagaagagaaaagagcagggcaggctggatggcatggctcacacctgtaatcccagcactttgggaggccatggagggaggattgaggccaggagtttgagaccagcctgggtgacattaaaagaccctgtctcaaagaaaacgaaaggagcagggtatatacaaggggtctgccagccttctcagcctttctgtgagaagcgagggtagggtagtacaggagagtggcaggagatgacactaaaagtaggtctgtgttgatctaacgagtctcaactttactgccaaaactaatgaactaggaaagtttaggcagcaagggccagagatggagtctggacttgtattgcagaaagttcctgtgacggcagcttggagggtgaatgagagtgtgggatggaggggtgaatgggtgtggacagactggaaaaatgactcatgcagggaatgaggaagggaggagccttgggagactctcaaatccctggcttagcctactgaattgcttgctacttgcctttttatgtcttcattttgcctcccattgtctgtgatattaaaggcctaacttcttagtagagcaaactttgcatctgctagcaggttggtgccctagctagcttccatgcccctctgcttagaatgcctgcgaaccactaaggactaatcctagtggtagaaatttattttcaattgttctcaaacccttgtagaattccaagttagaactgtagtgttctttttttatgtgggttagaaaatttgctgtttggagcaacatggtgaaacacaggacttttgaacctgcttatggtgcaaaaggggaaattatatttctacttcaacactggaggaggggggacttctgggagcaaaagagaaatggaaactgagatgagacatgttttttactccatgacagaatacaaagaaatacaaggatgatcctttaatgttagaaacagtagaataaccatcctggtaaataaaaaaggagaaaaaatgttattttacattagatacagaaaaacagaatggctaagaaaactcacaaagcaatggtcaatctataactcgagtccaaataaattgtgatataacactaaattaccactgatttggcctaattgactatcactggataacattataacatgaatgataatatttaaaattttaaagcactgtaacaaacaccagatcatgttaaaactattcaatcatgttgtcagctttcaactgccagtagcatcctaaccacatttcaaactatggaaattactaaaaaatcattattgtaataaaaagttaatagttcctcatttagaataccattgatattccctcagtgccaggagaacattatggtttctcctatttctgtgaagtgtatagtctacaggttcataagtgagtatatccatgagtataaaaagaaggtcatttatgggtggagagggaaattatagaaaacaatttcagatgaaataaactacattttcagataaaggaaagagtgttcactgcaggttcctgaaatatttcagtccattcaagttttaattataccaatgaatctcaataaaaatacagttaaggaatatggtttttatagataatgtcagctccttgtttaccaataataaagataaagataatggcaaaaaaaaaaaaaaaaaaaaaaaaaaaaaaaaaaaaaaaaaaaaaaaaaaaa

SEQ ID NO: 59041 - DNA, 560 bp, Homo Sapiens
  misc_feature (423)..(425): n is a, c, g, or t
  misc_feature (430)..(431): n is a, c, g, or t
  misc_feature (474)..(474): n is a, c, g, or t
  misc_feature (479)..(479): n is a, c, g, or t
  misc_feature (534)..(534): n is a, c, g, or t
  misc_feature (557)..(557): n is a, c, g, or t
ctagcagatttctagcagtatcttctgtcactggagattgcgctgcatttttaagagcctttctctggaggctctcaaggacttctgatgccctctcagcactcatagcattccttaacacatcactcaagagtctacatgatttggccccaagatacttttcaaagttcatttctcagttcataatagcccccatcaaattactcatgttattgtactctgtttccaccccttccattttttttcttatgtttatgcctttctttttggttcctgctcctgccttgatctacacccatctgattttctaaactgtatgaagtgtctagtagagtgcctgggacatagcaattgctctatacgtggcagatgttattatctgaggttcctaagtggatcaacccaaggtatgttctttatttnnntattnntttattttttgggatggaatctcattccattgcccagctggantgcantgtgcaatggtgaaatcttagttactggaacctcggctcctggggtcaagggatnctgggactacagggccccccacntgc

SEQ ID NO: 59042 - DNA, 5950 bp, Homo Sapiens
ccacaggaggatccagcacaccccatgtggggaatacccggttgaatgtcattaggttgatatccagcctgcttcaaaccaatgctattcagctccataaggtccccatttatactgctggtattggagtcatattgaacatgttcttcaagtatacatggaataactttttgcatacacaagtggaaatttgtattgcactgattcttgcaagtccttttgaaaacacagaaaatgccacaattaccgatcaagactccactggtgataatttgttattaaaacatcttttccaaaaatgtcaattaatagaacgaatacttgaagcctgggaaatgaatgagaagaaacaggctgagggaggaagacggcatggttacatgggacacctaacgaggatagctaactgtatcgtgcacagcactgacaagggccccaacagtgcattagtgcagcagcttatcaaagatcttcccgacgaagtcagggaacgatgggagacgttctgcacaagctccttaggagaaactaacaagaggaacacggtagatctagttacaacctgccatattcattcatccagtgatgatgaaattgactttaaagaaacgggtttctcacaggattcttctttgcagcaatttggcttcaacgatgagaagtttgcagatcaagatgacattggcaatgtttcttttgatcgagtatcagacatcaactttactctcaatacaaatgaaagtggaaatattgccttgtttgaagcatgttgtaaggaaagaatacaacagtttgatgatggtggctctgatgaggaagatatatgggaggaaaagcacatcgcattcacaccagaatcccaaagacgatccagctcggggagtacagacagtgaggaaagtacagactctgaagaagaagatggagcaaagcaagacttgtttgaacccagcagtgccaacacggaggataaaatggaggtggacctgagtgaaccacccaactggtcagctaactttgatgtcccaatggaaacaacccacggtgctccattggattctgtgggatctgatgtctggagcacagaggagccgatgccaactaaagagacgggctgggcttctttttcagagttcacgtcttccctgagcacaaaagattctttaaggagtaattctccagtggaaatggaaaccagcactgaacccatggaccctctgactcccagtgcggctgccctggcagtgcagccagaagcggcaggcagtgtggccatggaagccagctctgacggagaggaggatgcagaaagtacagacaaggtaactgagacagtgatgaatggcggcatgaaggaaacgctcagcctcactgtagatgccaagacagagactgcggtcttcaaaaggtaaccaggggtgagatcctgctggtagcttcaggttattgggaggatggtggggcagaaacctcaaacattaaaatttttaatttgattcaaatgaatgttcagatactagcttgatgtctttctgttgtctccattaaacacaataaatcttaatgaagagatggagagtttaggcccctaagtgccttttcccccataaatgtgttcagaagactgtattttacatctagcagtttgatagaactatgagaattgataaatctttaatcacaatagaaattggcttgtgtaacaggctacagagcatggcccatgaaaaccggtttcaggtcgactggttttacaaaaacctttacttattttcagtaacatacagatgattatctcaggacataatgcagtcatgaaaattcagtagcaaaatgatagctttaaaagaacgtgacccttagaaattcacttctaaactcaaaaaaggaattgtaatggatattaaaaacctaaaactgagagaataatgggaaaaatgtctgtcaaaacttaaggactgaagctaagcctgtgcttagagctttagtcttagagaccattccagccattacaagaaggaatgcctccctgcttattgcgaggtcactacaaaacaaggagtgaaagaagaaaactgactgtagactgatttcatacatgagcagttattctcaaaacttaagttaaaagctagcaaaccaaatgtagcaatgtattttaaagtcatgaccaaggatatgtgctccagtgacacaatgtaaacaccagtgtgtacatggtaaaaattattcagagtaattcccagacaaaaggagaaaagcatttgattacaaattaaagctgttcatgattttctttgcagcctaggaatagaaagtaaataggtgaaactggtaagtatctctagaaaatctagagtagacttgattcttcagtgaggcattagaagtattccctttaaagacaagaaccagaaagtgggacctacagttgctatttgtcttcagcactgtgctggtggccttagcaaatgcagcattccaaataaataaatagtcgctgttgataggctatgatttatacataaaaattccaatggaatctgtagataaggattaatagaaaagtttagcaggtttactggagacatacaaaatcacttgcatcctataaatcaatataagatattccatatgtgcctgtttttaataaaaatgtaaaaccttatctataactaggaatatgacctttatgggaaaacagtttaaaatctcatggaatatattgaagacctgaatataaataccaagatttgccatgtttatcaatgtgaagatatttttagcatttctgaacaagttagtctatgaaattaatgaaatttccatcaaaatcccaatagagattttcatggaaattgagaaactgattgtaatagtcataagaccaaagagagccaggaatagccaaaaacattttaaagaaaaaagtgaggggcttcaccatattagatatcaagacttagtaaagctggccgagtgtggtggcttgcacctgtaatcccagcactttgggaggattaggcagacagattgcttgagcccaggagtttgagaccagcctgggcaacgtggcaaaatcctgtctctgcaaaaaatacaaaaattagctgagtgtggtggtgtgtgcctgtggtcccagctacttgggggtgctgaagtcgaggctgcagtgagctgtgtcccccactgcactccagcctgggggacaaaatgagaccctgtctcaaacaaaagcgaaaacaaaacttagtaaagctactgagatggtgtggctttggcaaagaattatacaaagagaccccctccactacatgaacttgttacatgttagaatgccattataattcaatgaggaaagagtggactagtaaatagtgattatccacatagtagaaaaataaaattagatattttgtctcaacataaatatgaaaagcatgaactgtacagcttttagaagacaacaaaagagagtatctttacagtttgggtgtaaggcatttttttaaccataaaaagccaaaccataaaggaaaatcttggtaagtttgactttaatttctaatatcccagaagacataaaatgaaaagacaagccacaaccagtaaagaaccagtagccaggatattagaaataaccttatatcaatgagagatagtctaatttttttaaatggacaaaggatgcaaacaagcaactgtctgtggaggaaaacaaggagcaaaccaaatccagagtaaatgggacctgtcagttacagtagtaagtaaatgctatttcgtgctcaccagtctactaattcctatcttaagttgttagagaagatagaaaaagtacaaaacctgcccagctctttttatgagggcagtgaaatttgaattccaaaaccagataaagataattacagaaaatgatcagttcatgccacttacaggctactgaatgcaaaaatcctgtgtaaggtatttgctgactggatccaacagtgtattaaaaataatttataatgattagttagggtttatcctggaaggcaaggatggctcaaagtcagagaaatctgtcagtttaatctccatatatggtgttagacagaaagtcagtcatttgattttttttataaggttccatagctatatatgattaaaactctgagaaaaccagtaacagaagtgaatttatttttcttctttcctcctcttcctcctccctccttcctccttctttcttcttctttcttctttcttcttcaagatgagtgcagtgatgtggatctcggctcactgcaatctctgtctcctgggcttaagccatcctcccacctcaacctcccaagtaactgggactaggactacaggcacacgccaccatgctcagcaaatttatgtagttttttttttttttttttgtagtgatggggtttcaccatgttgcccaggctggtctcaaactcctgagctcaagcaatccacctgcctccacctcccaaagtgctgggattacagatgtgagccaccgcgcctggcaatgaatttcattaacttggtataagttaaataccaataccaaaatgctacagcaaaactaacacctaatgaggaaagtttagatgcattcactttaagacgaagccttaaaggatgtccattttcattgccagtgttaggcagtcctggaaggaaaaggaaatagagttataggtaaagatcaggaggaagtgataaaactgttgttctttgcaggtggtaatgattacctacaaccaagtcagtagcaaacttgtaactaataagaattcagtaaagctattgagtaagaaatcagtttaaaaaatcagtagtctttttcttcatcagtagtaagcaaccagaacataaaaagcaaggtattattccaaaatacatcaaaatataaattattcaggaatgatcttaacccaagtctctatagagaaatctggacaagtggagaccatggcatagcttagtgctgcagagacatctgccatcctgaagttagtgtttaacgcagtctcaatccaaatttcagttggatttttagaagtaacttaatactctaaaatttatatggaaaaatgaaggttcccaaattgcttagaggtaaccaaaagggaagattgaaaaagggacttgccctgccagatagtcacgctgcaaagtcacagtgattggaacagttttgatattagtgtccaaacaggtacaggtgtcagtgtgatgaaatagagggattaataatggggaagggagaggaagggctggttcaccaaaaggaaaagtcaggcaagatcctccctaatctacattctaaaacaactccagctggattaaaagacaataagaaaaacatgtgcagtgctttctgtggaccaggccctgctctctacactctccatgtgtggtagctcatggattattcttaggaaccctataagataggtactgggattattatccctgcttttcaggtgaggaaactgaggcactagagttaagtgatgaggccggaggccagagtctcatgatggttaataaaagaaatagagaatgtctttttaacctgtgtgcagaaagggacttctgtatctatctcatctgtctgtcatctatctatctatctgtctgtctgcctatctaatctatcatctgtcagtctatatctaatctagatttttttttttttaacacgaggtctcgctctgttgcccaggctggaatgcagtggcacaatcatagctcactgtaacttccaactcctgagctccagcagtcctcccacctcagtatcccaagtagctggaactacagttgtgtgccaccactcctggcttaatttttttgtttgtttacttttttatttttgtggcccaggctgatctcaaactcctggcttcaagtgagcctccttcctcggcaggacttcttt

SEQ ID NO: 59043 - DNA, 1807 bp, Homo Sapiens
ggttcactctctgtccgttgctagggtgagcttgaacaaatgctgatataccagatccagacaaaggtcttcctacatctgtctgtgagttgggactctcagaatgataggccacactttctcctagtggcgggccatgcctctgaggaactaaggattctttagaacctttccagctctgtttgcggttaactgattgctgcacattccctggtttcatgctggcattaataggtctggcagctgctgcagccatctgctctcgtcgaggatcttggtaactcattttactaatgaattcaattgctgcttctatacttctgttgttagttttctgaagagcttgtataaccatatcctcatcaaatccagcagcttgcaagtcttgaagcatttgtggattaacttctgaagtactccgagaagaatttgtttcatttgcaaatggaagcagagagtttcgaatttcctgcaaggctttatgatgcgtcccaaatttgggtggatttctgacttgtcgaggatcttcggttgacattttactcatgttatgctcagccttagcagcatcagatggtttagataaattcctaagggattcccgaatttcttgtaacatttgccggctactgacagtatagttactggcaggaaaggtcttaggcctcatttgtctatatccttctggcttttcactcctcttcatgaaaacatctatatatgtagcccacacgaaggacttctttatttgatagatccagagctttcttctgagcaaaagtgaaaatgatgcttcaaggaagtccccaggactgttaaaattctttacaatataaataattaactctggaggggagagcagagctcctggacagcggccacgggcctgagggcggacgctgaggcggccagagtccgtcccagcaaccccaagtatccctggtggggcagagcggggagacgaacgggggggctgccgcgggccagcgcggcccgtcccaggggtcgtaaggacctggctctccccttaacaccaggccaccgccgccgccgccgccattttgccttcagccctggttgtggaaggcgacagaagtcatggcgatgtttgagcagatgagagccaacgtgggcaagttgctcaagggtatcgacaggtacaatcctgagaacctggccaccctggagcgctatgtagagacgcaggccaaggaaaatgcctatgatctggaagccaacctggctgtcctgaagctgtaccagttcaacccagccttctttcagaccacggtcaccgcccagatcctgctgaaggccctcaccaacttgccgcacacagacttcactctgtgcaagtgcatgatcgaccaggcacatcaagaagaacggccaatccgacagattttgtacctcggggacctgctggagacctgccatttccaggccttctggcaagccctggatgaaaacatggacctcttggaaggtataactggctttgaagactctgtccgaaagtttatctgccatgttgtgggtatcacttaccagcacattgaccgctggctgctggccgagatgctcggggatctgtcggacagccagctaaaggtgtggatgagcaaatacggctggagtgccgacgagtcggggcagatcttcatctgtagccaagaagagagcattaaacccaagaacattgtggagaagattgactttgacagtgtgtccagcatcatggcctcctcccagtaacttcaggtgtttaataaagatgtgttgactcaaaaaaaaaaaaaaaaaaaaa

SEQ ID NO: 59044 - DNA, 541 bp, Homo Sapiens
atgaactttctgctgtcttgggtgcattggagccttgccttgctgctctacctccaccatgccaagtggtcccaggctgcacccatggcagaaggaggagggcagaatcatcacgaagtggtgaagttcatggatgtctatcagcgcagctactgccatccaatcgagaccctggtggacatcttccaggagtaccctgatgagatcgagtacatcttcaagccatcctgtgtgcccctgatgcgatgcgggggctgctgcaatgacgagggcctggagtgtgtgcccactgaggagtccaacatcaccatgcagattatgcggatcaaacctcaccaaggccagcacataggagagatgagcttcctacagcacaacaaatgtgaatgcagaccaaagaaagatagagcaagacaagaaaatccctgtgggccttgctcagagcggagaaagcatttgtttgtacaagatccgcagacgtgtaaatgttcctgcaaaaacacagactcgcgttgcaagatgtgacaagccgaggcggtga

SEQ ID NO: 59045 - DNA, 557 bp, Homo Sapiens
  misc_feature (444)..(444): n is a, c, g, or t
  misc_feature (492)..(492): n is a, c, g, or t
  misc_feature (499)..(499): n is a, c, g, or t
  misc_feature (523)..(523): n is a, c, g, or t
  misc_feature (530)..(530): n is a, c, g, or t
  misc_feature (539)..(539): n is a, c, g, or t
  misc_feature (545)..(545): n is a, c, g, or t
  misc_feature (552)..(552): n is a, c, g, or t
agacagaatttcgctcttgttgcccaggctgaagtgcagtggcccagtctcggctcaccgcaacctctacctcccaggttcaagcgattctgctccctcggccttccgagtagctgggattacaggcgtgcgtcaccacgcgtggctaaatttgtatttttagtagacacagggtttcaccatgttggtcaggctggtctcaaactcctgacctcaagtgatccaccctccttgacctatctcagtgctgggattacaggcgtgagccacacctggctgccttttaactgttctgataagcaaactctacagttaaaaccaatttttgtgtgcactaaaaataccaacttcctcatcaaaatctacaaagtaccatgtgaaatgaaatggcatgaagacaacagtaagaaaactgtagctataactcagaaaaagaatagctgngatgcatacatagttggaaaatgcataagacaaatctgaagagaagtngaaaatnaaagaattctcttttttttaaaanggggttnccttttggnggccanactggantgcaa

SEQ ID NO: 59046 - DNA, 2305 bp, Homo Sapiens
actggcatttatagtcaagtattggggatttttaaacccttacaagatgaggctaaaagttatataacaaaatctgtagctaacttcatatagtattcttcatacatacacacacattgattggcagtgagagagaagggcagtaattgaccgatttagatattaattggtttgttacaatctgtgactctgagctaatcagaaccagaacatgtagttctgaagctgtgtttcagtctgctcattgtaccataattaggaagaactgctttggcaaatcatggaatttgggagcttatataaagggacttcattatcattattctataggaagaactgctttggcaaatcatggaatttgggagcttacgtaaggttacttcattatcattattctaacttatttttccaatgaagaagcagatctgtctggagaggttaagttgaactaaggttttatagaaagctggtggctaaggcagaactaaaggtaactttctaagacccaatctgatatccttgagtcttattgtaggcttttgcctttgttaagcatactccaactaataccccaactaattccaggcaaatggaagtttaatgcaaaagcgtcatggaatacagcagttttctaataatataatttgttatttagaatatacactgtcatgtcatgctatatgtaaaataattaggcaaccattaacaccattattacacagtttgttttgaaaatgtgttaatcctgcctccaacctaaattttgtcaaggggcttctatttctttttttggggggcaggtaatatttctcttggttatgatatgacataatatttaagaactacagattctgtttttcttggcattagtggtgattgggaggaatagaaaagaattacaagcataatattccagcacagttacgtgtgagatgtaaattaaaactgttctataaatttgtaagtttcaaacaagtataactgttaagcaaacacagcaggaaattgtaaactgtttcgtgcaagagggtgttttagggcatttttgccaaggttaggtttcaggctcatagacctactatgtataattatcacaatattttcaagtaaagtttacaagattctttaaatttgggaagaccaaaattaaagacttaattgttatttttttgagacagggtcttgctctgttgcccatgctggagtgcagtggtgtgatttcggcttactgcaacccccgcctcccaggttcaagtgagattcttgtgcttcatccacccaagtagctggattacaggcatgcaccaccatacctggctatttttgtatttttagtagagatggggttagaccatgttggccaggctggtcttgaactcctggcctcaggtggtacacccacctcggcctcccaaagtgttggattacaggcatgagccaccatgcccagccaatatattagaatttctataaatgctgtttgagaagtaacatctttactttctaagagtccaaaaattagcaaacaggtacatgttcaaaggtaaatgctaagaaattgggtaatccactctaacagagaacagagattgtatctattaatctatagaaggaattgcgtaactcattattttgggaataatgcttgtctttacatggattatgtctatcaatctgtagaaggaattgcataattcattattttaggaataatgcttgtctttacatggggcaagtaagaggttaattattagtgtggattcttcttaaaaggaaattagaaattatctacatgacaacatatcctccctaccagtgactaaaggaggcagaataggagtatctatgcaagcttttaacactgacattgtcccaaagtaaaattagcagataaaatcatatatgacagctgttagtataattttttgcttttgctattgttttataatttgacaactttttaaaactttagaattcctaatgtcttgtcttaaaagtttttcaggctgggcatggtggctcaagcctgtaatctcaacatgtttagaccaagacaggaggattgcttgaggccaggaatttgaaattgtcctgggcaccgtagcgagactctgctttctacaaaaataattaaaaaaaaaaaaaaattgccaggtatggtgatgtgcacctgtagtcctaactactctaagcctgaggcaagagaattgtttgatcccaggggttcaaggttgcagtgagctgtgattgtgggccactgcactccagcctgggtgacagagcaaaaccctatctcaaagaaaac

SEQ ID NO: 59047 - DNA, 416 bp, Homo Sapiens
tctttcttttttttttttttaagacgtagtctcactcttgctgcctaggctggagtgcaatggcacaatctcagctcaccgcaacatctacctcttggaattaagcaattctcctgcctcagcctcccgaggagctgggattacaggcatgcaccaccacgcctggctaatttttgtatttttactggagacggggtttcatcatgttgatgatgaaaggtcccaaacctgagaccttcacatgtgaagggaacatgtaatcactacactacagaaacccctcacagttcctggcacaagacatattcctgaaatgttaccatctgctgtttttaactactagggtttccaatataacaaattcgactgcttttcaaaatttgagtgataaatacgccaggaaacacaatccctca

SEQ ID NO: 59048 - DNA, 1672 bp, Homo Sapiens
ataacataatcaaagaggaaaaaccagcattggtgaattcatcccttcctttcaacttggcctctctcacccactttacttttagtgcagagttcagtgatggctagcagctgtcccctgatatttgttattccaagtatccattcataggtctggggagaggttgtggcaagctttccctaaataaatcacacccttatcttctaagcttgagcagtggagggagacttttcattcgaggtgggtggctgaacatcatcattcctgttctggacttcttgtaatcatgttggattcagagggcaccactctctcttgtacagatctgacctaacatagacatagactatagcagagatgaatccaggctataacatttaacaagaccttattaaaagcttcaagatgttagcctttatctgttccatatctagcttacttggttgtttttgggggatcacatgtctgtcctccaaactggaaacgtctaactctccaggagatgcagtagcattatttgttggacagtggcacctactggtagtttgtaatgtttatagcctagtgtgaaaggcattgtaaatgtatacctagcaaaaaggggagtagagcaaaatttccagagttttacaaatgaaatgaaggatgatatgggggagagtcctttggggccaaggagagagagcacagactagaaagtaatacaagcagaaagaaggatgtcagcccatgtctgtgtggtagaggtcatctttccatctcactgggattgtccctgaaagtgtctcactgcttaggtctccttgcctgtctaaggcttggagaccttccagtatctcatgccttattctagatctgcttttttccccgaggtgaaaaaacctgttcaaatggtcactcacaacttttgtggccttactttttgtctccgaaaggacaaacatatcagaactaacatccacccagaagaagggctgatcagttcctttcaacacagcatggatgaaaacccaggttagcgttagtgcttcttgaattggaagtattctaacctctatgtacctaccaatgtaagaactgagggcccttttaagggaacttacattcctaaagttcaagtcaagttgtcatgaagagtacttaatgaggcatacttttaatctttgaatcgtagtgttgtagggctaaaagaaacctcaggccaggctgcatggtggctcacgcctgtaatcccagtactttgggagaccaaggcaggctgatcacctaaggccagtaatttgagaccagcccaaccaacctggtgaaaccctgtctccactaaaaatacaaaattagcctggtgtggtgatgcatgcgtgtaatcctaactactcgggaggctaaggcagaagaattgtttgaacccgggaggcggaggtttcagtgagccgagatcatgccattgcactccagcctgggtgacaggagccaaactccgtctcaaaaaaaaaaaaaaaaaaaaaaaaaaattagccaggcgtggtggtagccgcctgttgtcccagctgctggggaggctgaggcaggataattgcttgaacctgggaggcagaggttgcagtgagccgcgattgtgccactgcactccagcttgggtgacagagccagactgtctcaaaagaaaaaaagc

SEQ ID NO: 59049 - DNA, 3076 bp, Homo Sapiens
gaattcaaaatgtcttcagttgtaaatcttaccattattttacgtacctctaagaaataaaagtgcttctaattaaaatatgatgtcattaattatgaaatacttcttgataacagaagttttaaaatagccatcttagaatcagtgaaatatggtaatgtattattttcctcctttgagttaggtcttgtgcttttttttcctggccactaaatttcacaatttccaaaaagcaaaataaacatattctgaatatttttgctgtgaaacacttgacagcagagctttccaccatgaaaagaagcttcatgagtcacacattacatctttgggttgattgaatgccactgaaacattctagtagcctggagaagttgacctacctgtggagatgcctgccattaaatggcatcctgatggcttaatacacatcactcttctgtgaagggttttaattttcaacacagcttactctgtagcatcatgtttacattgtatgtataaagattatacaaaggtgcaattgtgtatttcttccttaaaatgtatcagtataggatttagaatctccatgttgaaactctaaatgcatagaaataaaaataataaaaaatttttcattttggcttttcagcctagtattaaaactgataaaagcaaagccatgcacaaaactacctccctagagaaaggctagtcccttttcttccccattcatttcattatgaacatagtagaaaacagcatattcttatcaaatttgatgaaaagcgccaacacgtttgaactgaaatacgacttgtcatgtgaactgtaccgaatgtctacgtattccacttttcctgctggggttcctgtctcagaaaggagtcttgctcgtgctggtttctattacactggtgtgaatgacaaggtcaaatgcttctgttgtggcctgatgctggataactggaaaagaggagacagtcctactgaaaagcataaaaagttgtatcctagctgcagattcgttcagagtctaaattccgttaacaacttggaagctacctctcagcctacttttccttcttcagtaacaaattccacacactcattacttccgggtacagaaaacagtggatatttccgtggctcttattcaaactctccatcaaatcctgtaaactccagagcaaatcaagatttttctgccttgatgagaagttcctaccactgtgcaatgaataacgaaaatgccagattacttacttttcagacatggccattgacttttctgtcgccaacagatctggcaaaagcaggcttttactacataggacctggagacagagtggcttgctttgcctgtggtggaaaattgagcaattgggaaccgaaggataatgctatgtcagaacacctgagacattttcccaaatgcccatttatagaaaatcagcttcaagacacttcaagatacacagtttctaatctgagcatgcagacacatgcagcccgctttaaaacattctttaactggccctctagtgttctagttaatcctgagcagcttgcaagtgcgggtttttattatgtgggtaacagtgatgatgtcaaatgcttttgctgtgatggtggactcaggtgttgggaatctggagatgatccatgggttcaacatgccaagtggtttccaaggtgtgagtacttgataagaattaaaggacaggagttcatccgtcaagttcaagccagttaccctcatctacttgaacagctgctatccacatcagacagcccaggagatgaaaatgcagagtcatcaattatccattttgaacctggagaagaccattcagaagatgcaatcatgatgaatactcctgtgattaatgctgccgtggaaatgggctttagtagaagcctggtaaaacagacagttcaaagaaaaatcctagcaactggagagaattatagactagtcaatgatcttgtgttagacttactcaatgcagaagatgaaataagggaagaggagagagaaagagcaactgaggaaaaagaatcaaatgatttattattaatccggaagaatagaatggcactttttcaacatttgacttgtgtaattccaatcctggatagtctactaactgccggaattattaatgaacaagaacatgatgttattaaacagaagacacagacgtctttacaagcaagagaactgattgatacgattttagtaaaaggaaatattgcagccactgtattcagaaactctctgcaagaagctgaagctgtgttatatgagcatttatttgtgcaacaggacataaaatatattcccacagaagatgtttcagatctaccagtggaagaacaattgcggagactacaagaagaaagaacatgtaaagtgtgtatggacaaagaagtgtccatagtgtttattccttgtggtcatctagtagtatgcaaagattgtgctccttctttaagaaagtgtcctatttgtaggagtacaatcaagggtacagttcgtacatttctttcatgaagaagaaccaaaacatcatctaaactttagaattaatttattaaatgtattataactttaacttttatcctaatttggtttccttaaaatttttatttatttacaactcaaaaaacattgttttgtgtaacatatttatatatgtatctaaaccatatgaacatatattttttagaaactaagagaatgataggcttttgttcttatgaacgaaaaagaggtagcactacaaacacaatattcaatcaaaatttcagcattattgaaattgtaagtgaagtaaaacttaagatatttgagttaacctttaagaattttaaatattttggcattgtactaatacctggttttttttttgttttgtttttttgtacagacagggcagcatactgagaccctgcctttaaaaacaaacagaacaaaaacaaaacaccagggacacatttctctgtcttttttgatcagtgtcctatacatcgaaggtgtgcatatatgttgaatgacattttagggacatggtgtttttataaagaattc

SEQ ID NO: 59050 - DNA, 453 bp, Homo Sapiens
ggtcgactttttttttttttttttgtaaccatgatggtctttttaacaagcaagtgactggactgtttgcaaaggaaagaaaacattttccaaggatagtaagtattctacgaattcctagccagcttttgtcttcttgaaaattatcaccataaggaaagaattaaattacactggcatttataagggattaggcacaccaggtaccctatgcttcaatcctgtcctttcatcttccttccatttctctgtcttgggacatggtaatttggaggtgagaccaccctttcttgtccctgacaaagaatcctgtcatctgcagaatctctattcttccagctggctcctagcagggtagggagagacacagaaagagagagtcaccgttccacttcagatgctgcaagttgctgtagaggagctgccccgccgtcccagccgcccgggtgaact

SEQ ID NO: 59051 - DNA, 1217 bp, Homo Sapiens
aaacaataattgaaggtgtccactaaagatccagaatcaaaatacaacataatgtcttttatttgaaattacattgtaatacagccctctcttgaatgttagaattgggttttgatgctttgtcaaaaaggggagcagatgaccaccagaggctttgggtagctaaggcaccataaaaagcaggttaactatctatgagtacaggaagtggattattaatctgattattctggttgttactattaccaggaatactacagggtgttgtaattcttagcatattcatttattctaccacggaaaagcaatgtgaatcaaattttaaaatttactattttagaacaaagtgctaaaggagtatttcctaattgatatttttgtgcctaataaagggggttttcctgtaagtcgtattaataattctctaaggggacccatgtcattccccaataaagcaacaaaaacaaaaaaccaaccgactgcttttgaaatgccagcttttaccttaagcagctgccactaagatgtttaataacaagactggaggagctgataatggtactatgattctgttttaagagtctttcatacattctgaaatgtttatgagtgaaatggtatgtcagggatttttcgtaaaacaacttttaagaggggcatagagaaagcttatgggctacaaaagcacaatgatcataaactgaactgccaaagctggatgacaaggacatgagaagttatttctatttgtataagttataaatttttcctaatacaaatgaaaagaaaataactactgttagtaataagtactagcaggatttaactactgctaaagttagtgaaaaaagtagaagctaaggttcagtgccttacatatatgctacacatctaagtgctttgtaagactttatcaccaggcgcggtggctcatgcctgtaatcccagcactttgggaagccacggcaggtggattaccataggtcgggagttcaagaccagcctgaccaacatggagaaaccccgtgcctactaaaaatacaaaattagctaggtgtggtggcgtatgcctgtaatcccagctactctggaggttgaggcaggagaatcgcttgaacccagaaggtggagggttgtggtgagccgagatcacgccactgcactccagcctggacaacaagagcgaaactccatacttttaaaaaaaaaaaaaaaaa

SEQ ID NO: 59052 - DNA, 600 bp, Homo Sapiens
tttgagatggagttttgctcgttgcccaggctggagtgcaatggcgcgatctcggctcactgcaacctctgcctcccaggttcaagcaattctcctgcctcagcctcccaagtagctgggattacaggggcccgccaccatgcccgactaatttttgtatttttagtagagacggggtttcaccatggctggtctcgaactcctgacctcgtgatccacccgcctcggcctcccaaagtgctgggattacaggcatgagccactgcgcccggccactaatccatattacaaaattaaagcctcaaaattaatgttttatctcaattatagtcattctgttgcaaggaacttttaagaagcaatgttggttaccaatgtgaccaaataaatgcaacttaggtttagattacccaagtggttaccaactgatagcttaaatgagggctgagggtgacggaaaaaataaagattaattccacgtcactaaacgggtattttaaagttccagaggcaacaaaagtgacaattccatcgtaatgtgtctcatcatatggactcagaacatgaatcaactctcaatctgaagcccagtgtgaccca

SEQ ID NO: 59053 - DNA, 2091 bp, Homo Sapiens
gcacgagactgcactctagcctgggtcacagagtgagactctgtctcagaaaaataaaaatataaataaataaataaataaataaataaataaataataaataaataaataaggtaggcattggcttaagggaatgctgtggctggttagatctgtccagcccaataaaatttttcccacactggcaataaggctgttttgctttcttatcatttgtatgttcactggagtagcacttttaatttccttcaagaactttccctttgcagtcacaacatggataaccttggcacaggaagcctagcttttagcctatcttggctttcgacatgccttcctcactaagcttaatcatttctagcttttgattttaagtaataatctgtgactctttctttcacttgaacacttagaggccatttaaagttattaattggcctaatttcaatataattttgtctcagggaatagggaggcctgaggaaggagagagaggggtgatagccagtgagtgcagcagtcagaccaggcatgacgtttatcgattaagtttgtggcatggttcatggtgccccaaaacaattaaaatagtacatcaaacatcactgatcacaaatcatcatgagagatataataacaataaattttaaaatattgtgagaattaccaaaatgtgacaaagacacaaagttagcacatgctgttggaaaaatgactctgatagactcaacatagggttgccacaaaccttcaattttaaaaaactgaagtatctgcaaagtaccatacaacaaagtgcaataaaacaacctatgcctgtacttattaacacaacatatcaaagtactaatagtgaccttagggctgagccctgatttcatctgcctgtttcctcaatggaccagttttaacatctgcaaccaatatatacttcagtcattaaaggaacaatacacctagtatatatcagtggtagatgacctgggctgatggggataagagggaaaatggccatttacacaaacaggtcatttccctgctgcatttcttcaagtcaaagctgtactcttctgtgtacccttctacacattttcacattacattcatggttacattcatcaagctgcataaagattattgcagtggatgccaacagtgttagttaccatagtttcttggattgttacactgtgcccaaatttggagttctgataagtcagaggatcttgcagcattgtcaaagacaacccaaaggaatgtagtttcagaacaaaagccaggttctttctgacaatgacatgaaaattactgaatctgtcatgtgtttttagttgaagtgagaggctcatttgaaaccagcctaggtgctgttggataaagtcaaagtattgctactctaatagcaaaattactcagtacacagaagaaaaactattactttatttccttatttaaaaggacaaacaggagtgatgaatagagttagaagatattaatattccattcgcctgacttccatatagaaaccccaagcatttccagggtgaaatttttattattgtctggagatttcctgcttattttgattcattagatccttaaaaggaatggaaagctttgactccagaataaaagacatttatttcctttggagtcttattcttttaagtacttcttaaaacataaccatcaccatcaccagaattttttaaacatgagaataagacagacagaacttttctttggtagtgttaacacaaaaggtgtctgatcttcatacaagcaatctttgctcacatacatcaaaatggaatgacacaaggaaagaaccattttgcaaaaggaaacaagacaagctgccgtcagctagatacgtttcgattgttcaggaaagtctgtacaggaactttgattggcatcctgcttgtctaccttctttcctactttaaagtggtagctctgatcattgttgtcagtgttttctgacccctcagatctggtctttgcctatcatgtctgatgtaggcacttggttcgattaccttgatttgcaggtgaattggtcctcaatccaaaaaaaaaaaaaaaaaa

SEQ ID NO: 59054 - DNA, 5120 bp, Homo Sapiens
gaaatgggtggcagatgttgtactgttctgatgtactgcagagtgctatagtaggtcagaggatgaagcactgtggaccagtgtggtcagggaagcttcctgcagagtcagggagtgagctggaccttaatgttcatttcggttccgtaaacatttgagagctcgctctaggctagactctgttgggctttggctctacagtggtgaaaaaggcactgttcctgcccagatggatcgtctatcgtgtgtcagagggtggatattgtttgcatggatataatgttgtctttgctgatgacaattgccatatatattcctgtaatttgtgtgtgtgtgctatgtccattatttagtgtagccctcataacatctctctacaactttgtattaatatccttgctgtacagttggggaacctgaggttctgagatgttaatgaaattgtctgaggttgcagagccagatgatggcagatctgagatttgaatttgtgtctgtgtgtttttctatctataagacactgcttcaaaaaggtgaagggaagaggcacccttaaacagagttatgaatgactgtggtatgtgtgtgttttggacatggaagagtttggtgaagtgttggagagtagtggaaagcaaagcgggatcgacaggtgggaccagacatacatagtcatgtttataaacaatagtaataaatgtttgtggcatgaaagaagacagtgcttttggtttgggccgtattccaagaccataagaagactctcatattcaaatagaattgtcaaaaaatcaaatgtgagtgtaaaaattaccattccattcagtgcattttttcaccaatgtggataactgagagttgacagcactggctatgcttaatcaattatggaaataatagtcttaaagaagtaacagacatcagtcaccatgatactatgataatgtacacatgagcctaactcttaattgtagccagttattgtaaactgaagggatttgaggaacagcttttcttttttttttttttttcagacagagtcttactctgtctcccaggctggagtgcagtggttgaatctcggctcactgcaagctctgcctcttgggttcatgccattctcctgccttagcctcccgagtagctgggactacaggcacctatcaccacgcctggctaattttttgtatttttagtagagacgggatttcaccgtgttagccaggatggtctcaatctcctgacctcgtgatccgcccgcctcggcctcccaaagtactggggttcaggcgtgagccaccgcgcccagccgaggaacagctcttcttttaaatgtcttaggagttcttattttgaataaggaacctttctagcaaagaggcagaaatgaaacttttgttttatatttaggtcagaatttcatttcacctcaactggctatctatttttataccaaagctcagtagtgtgagttaattttttatcactgtaatagttatacatattggtaaatgctaagaatgaaaaatagcaatgttctaactcctgtctccccccctccccccacctgttgtcctggccacttaacaaaggctcatactattatttttttgatgaatcaattttaggattttgtctattgacttcattcccatctcgttaggctgagatttagcactcttctctttctttcatagttactcaacccagctttgccctatcatctaatcattccagtattactgtatcacaaatattggttattattcagtgtttacactatttaaactatgtcactgttattcccagatgagccaagtagggtactatgattgtattccttcattatttaactcttttctcctcatgataaaaattttccccccagtggtttagtttatctattgcaaaaccttcctacatcttcagcatgatttcatacattcaaaccaattagatggtttatcagttcatttttttgttttgttttgtttttgtttttttcctgaagacctccatctgagagtcctttgtcatccttctgctctctggattggttgctcagtgggcctgctgcccaggtgatttcctgaacttccttttaatcatcatcttgggaattctctttgccccctatttattccacgtgtcgtttatggaatcttgtatttttttggttaaactcctttttgttggaacataatctccagtatcttcctaagaaagtatttgtaagtcataaagtataagacttttaatctctgtaaatgtcttaattgctttcacacttgatagtttggctgggtacagatttctaggtagttttcttcagaattttgtcttcacatttccagagtttttagaagcatagtagttaagagctcaggccccggagctagactcagtttacattctagctccatcacttagtaatgccatgactttaaatatattatctaatttatctttatagttgtcccttgactatcatggtttgaactttgtggatccacttatatgtggaattttttcaatcaaatacggatcaaaaatacagtatttctgggatgcaaaatccatgtttatatggagaggattatacacaaaatcaacgtttgtatgctcaagttcttgtgggctgactgcgggatttgagtatgtgagaatttgggtatacgtgcacagtcctgcaaccatcccccttgtgtaccagactgtactatgattttctcatttgtgaaatggatttataaataatactttcctcatatgggatttgttgtaaggattcagttggttactatagccatttagaaaagtggctggcacatgatgagggctttttaaaattgactattattactctaggtcctttatatgtgacctaaaaaacattcaaaagtttatgcatgtgttctttttcctaggtattctgaaatttcataatggtctgctttagtaacttttttcacattaacaaggtagagacccatttggtggaaacgatgctcttcagttccagggctttttggttgttgttgctttaagaattactacccacctgcatcctggattttctctgttttctctaacctactagtcagatgtttaacctcttagaataacttcctgacttttaaagttttacatgtttgactttctgagagatttccttactttattttttaagcttttctaatcaaaattatttcagagccatgatggttttcatttctaacatcttgttctaatctactggctgctccagttcttattttatgggcactatattttctcatacttctgtgaggatacaaattatggttttaaacaattttttttttgtccatgcattagatctgctttttttgaggttttttaaagaggtgtgtgtgagtgtgtataggggtggttctgtgtgaatctccccaccaccacccagattttttataattgaggtcttctttaaatgtctaatgatccttgactatttattcaaatgtaagagtagtgcaccatgaatctctttggcatcttttgtgtgtgtatatgtagggggtgtttagctggtgagctttattgtattatataatgacctgggggagaaccagctgttttcttgggactgccaaaggtcagcatccaagcagctttctccatagtggtccagtttctttcagtaagaaacttccagtcacacacctgtgaatatactcctgttgccagcattctcagagctggtgtgtgtgtgtgtgtgtgtgtgtgtgtgtgtgctgggaaagaggtagacctagttatatgaaagttggaggagcaggaggagggaggaggaggagctaatattgagtatttattttgtaccagacaccatcctaagtgctatagctcactcagtcctcacatcagctctgcagctttgcacctgttattgtcatcttttttttttagatgaggaaagtgaggtacagagacgttaagcagcttgcccaaagtaaggcatctctgctaattgacagagctgaaattgaactcaggaaccttctagattctatgtatttggcttttcacaacatcattcttgttttcaatccttgtcactatctctgctgtgcctgagattcccaaaacgagttgtggttaacccagagaataacccttcagtgcctgatgttggtggagagaagaattgcctagttacatctcatatggctcagcaggggagaggagtgccctcatggttgctaaatgtgggaatggaatgtgaggcaggaggcaggtgagaggttagtacaggtgggaggtgtccccgctgtgtggggaggagggacttttgccactagttctgttacaggtttgggattctaggacactggacactaatgtgcctaatctgtaaggcattctagactgcatcttgtgcagttcattcatcttcccgcctcgcaagccagcagagcctgacttggggcctcagctctgcatggagctacctattgggccttcaacagcgagggttttagtcagaaacacagaaatgaatccttagtgcactgggcagtgggtatcgtattttactaggaggtttttgtctagaagttggtcatttctctgggatatggtataggatgggtgggaagggtgccacaaggaaaaacatgagaatttgtactgtgcaacagtttggtgtttccagttgggtccacccacaaccttgactccaaacttccaaaacaaacacacctgtgcattttgcccaagattctattgctgggtgtttttattgtaccttctggcaacctacatttggtttctcttcctcattgttgctgttttagggaattcttactgacatgtgttgttttttccacttggcctagttagatttggtctactaaaatacagaggagattgtctctatcttagggacttttctttctcctcctagtcaagctcacttccagcctttctttttcctccctgtatataatccctgtgacaacgtttaaggcagaaccgagatttgtatgttttagctctgttctttctttgctggttaaatttttagagtttaaggaagagttcattaatcagaaccttaacattaaaaaaaaaaaaaaaaa

SEQ ID NO: 59055 - DNA, 942 bp, Homo Sapiens
  misc_feature (499)..(499): n is a, c, g, or t
  misc_feature (848)..(848): n is a, c, g, or t
  misc_feature (851)..(851): n is a, c, g, or t
  misc_feature (874)..(874): n is a, c, g, or t
  misc_feature (881)..(881): n is a, c, g, or t
tttatattatagcctcttttagctctttaagtcttctatgggtttaatgggaggctttagtggtgtatagagggtgtgtgtgtgtgtgtgtgtgtgtgtgtgtgtgtgtgaaatggatttattttattctacaaatgaaatgaataaaatcacctgaaatggaacggaatggctacagcgagtgtccaaagaccacaaaactgtttcctgacatgtgcttagcatatttaaattgttctcacagtatcatcctgagagcagagagagcagtccaactgctccacaggactgcagagagggaaccaatccatctattttctcaataatggtgatgacagagatggaatgctgattgccaaatcccaaacacatacgggcctctcacccaaaggccatgatgcctttgtcttaataacagaataaacccaatcctgtacaaacagcttcttcagggtgcatgttttgaatggggcaaagattagctttttgtgggaggctntccaggataccggacaaaagcatgcactagagactcactaggtagattcaaatatctttctaccatttactaactgcttgatcttagtcaagttacataaaaggggctgtgtggggaggaggggctcttgtccacatctgtcaaagtatgaataacaattacaccctaactcgaaagtggctgtgaagactgaatgaagtactacctgtgaagtacatggtatacctgtaggtgctttaatgtcacctattaaatgctgggggtgatgaggatcaaatttcgccagggacccccacccgagggtataactcatccccccttttcacacgtgcctcgatgctaaattatntcntcgaaatgggcttactttttcantccattntcgacccaggcctcttgcagcttggggaatcgaaatcttaccggaatcctttttcatcgaa

SEQ ID NO: 59056 - DNA, 932 bp, Homo Sapiens
atgtctgctgaagtcatccatcaggttgaagaagcacttgatacagatgagaaggagatgctgctctttttgtgccgggatgttgctatagatgtggttccacctaatgtcagggaccttctggatattttacgggaaagaggtaagctgtctgtcggggacttggctgaactgctctacagagtgaggcgatttgacctgctcaaacgtatcttgaagatggacagaaaagctgtggagacccacctgctcaggaaccctcaccttgtttcggactatagagtgctgatggcagagattggtgaggatttggataaatctgatgtgtcctcattaattttcctcatgaaggattacatgggccgaggcaagataagcaaggagaagagtttcttggaccttgtggttgagttggagaaactaaatctggttgccccagatcaactggatttattagaaaaatgcctaaagaacatccacagaatagacctgaagacaaaaatccagaagtacaagcagtctgttcaaggagcagggacaagttacaggaatgttctccaagcagcaatccaaaagagtctcaaggatccttcaaataacttcaggctccataatgggagaagtaaagaacaaagacttaaggaacagcttggcgctcaacaagaaccagtgaagaaatccattcaggaatcagaagcttttttgcctcagagcatacctgaagagagatacaagatgaagagcaagcccctaggaatctgcctgataatcgattgcattggcaatgagacagaaaacgcccactcctggatcttcacattgaactcaatggctacatgtatgattggaacagcagagtttctgccaaggagaaatattatgtttggctgcagcacactctgagaaagaaacttatcctctcctacacataa

SEQ ID NO: 59057 - DNA, 1294 bp, Homo Sapiens
ccggcgcgacccgcaggagcgtagagagcgcgggactagagtgcagagctccgggacgtggatcggagccggcgcgatgggcggagagcaggaggaggagcggttcgacggcatgttgctggccatggctcagcagcacgagggcggcgtgcaggagctttgaacaccttcttcagcttccttcgacgcaaaacagactttttcattggaggagaagaagggatggcagagaagcttatcacacagactttcagccaccacaatcagctggcacagaagacccggcgggagaagagagcccggcaggaggccgagcggcgggagaaggcggagcgggcggccagactggccaaggaagccaagtcagagacctcagggccccagatcaaggagctaactgatgaagaggcagagaggctgcagctagagattgaccagaaaaaggatgcagagaatcatgaggcccagctcaagaacggcagccttgactccccagggaagcaggatactgaggaagatgaggaggaagatgagaaggacaaaggaaaactgaagcccaacctaggcaacggggcagacctgcccaattaccgctggacccagaccctstcggagctggacctggcggtccctttctgtgtgaacttccggctgaaagggaaggacatggtggtggacatccagcggcggcacctccgggtggggctcaaggggcagccagcgatcattgatggggagctctacaatgaagtgaaggttgaggagagctcgtggctcattgaggacggcaaggtggtgactgtgcatctggagaagatcaataagatggagtggtggagccgcttggtgtccaagtgaccactggagctccaaccgcggtggcgcgctctagaacctagtggatcccggcctgcaggaattcgcacgaggagactcgcagcatggtggaaaagatgatgtatgaccagcgacagaagtccatggggctgccaacttcagacgaacagaagaaacaggagattctgaagaagttcatggatcaacatccggagatggatttttccaaggctaaattcaactagcccctgttttttcctccctgaactcttggggctgagctgcaaccacccaactttctttcccactcttctctgggacttgtgggcctcagggcttggggcaggcatgggactggcccaggcacacaggtcccggggcatcaggagaaaggctgggtcttgggaccatgtcctccaagttggcctactgttacacattaaaacgatttgcccag

SEQ ID NO: 59058 - DNA, 1713 bp, Homo Sapiens
atgatcttatttaatttaattgttatttgtattctatgaagtaagctatacacacactgttcagatgatgaacctgaggcttaaggtagttaattgctccagatcactcagctagtaagtactgaagctgatatttggacagatgcctgactccaaagtcatgctcttaaaatgcaaatgatgaatatacatttgcattctttattccaaaaaagattttgttctttagtgataaaaatcatgaaaaccacttggtctattgctccataaatctgcttaatcagatattattattgcctcactaactctcctttttaaaagaagatccaaagatgataaaatataaggacaaaactaagtaagcttctcttaatggaaagtaaaaatgtttcaattttctcccttgtgttttaagctgaagaaagcccttgatgaagctaacttcagatcagtggaagtgtcccggaccaaccgagagctgcgacagaaacttgcagagctagaaaaaatactagaaagtaacaaggagaaaataaagaatcaaaagacccaaattaagctccacttgtcagctaaggcgaataatgctcagaatatagaaaggatgaaggttgtatgggaaacctcttctcacttcctggataccctgtgaggatgtagtcagtcaatggtgtctagggaagacaggttttagaaccctaccagccccatgtattctctgggaattatagccagttgtctttggggagactttttcagtggagtcactgctgtgtaaatgtttgatttctcatttgctgccagtgtcacattccggctccctatctgtcccttccgtgttgattgtactggactttgctcttttgggatcagtgggctagatgggaaagaaagctcagcaggaactggtaactttgggtctcatattggattctttctgtcatcctataggcaaaaagagcaagccagtttttccactgatcatctttttatgttattttccaattacttttagcaaatagaaaaagaattgaagcaaatggagctaattaaggatcaatatcagaaaaagaactatgaacagtctttgagtatccagagatttgtgtgtgaaatgactaacctgcagaaagagatgcagatgttggctaagagccaatatgatgcctcagtgcggaataaacagcaagagctgcacctagaagcagagcggaaaataaggcaggagctagagaatcggtgccaggaattggaagaaactgtcagacacctgaagaaatgtaaagaggcaacagagaatacgctgaaagaagccagtgtggaatcagaacagataacagctaatctggaagaagctcatcgctggtttaagcacaggtttgatggtctacaacttgagctgacaaaaaaccggttgcagaggccttctggggaagacaggtggcaggaaaaggaccaagatgtaaaacatgatgtcatgtccttgacaagggagcttctttatgtgtagctacactccatgattccaagagcccagcagccggggctggcctgtttctagagtcataagaacatgaagtctttgatgtgggctgaagattttggacctgagtttatcactttatgaactcttatatcagtacaaaactacccctttttttgtcccttttcacattttccacccaataaatttgtgttaatttgttgtatgat

SEQ ID NO: 59059 - DNA, 582 bp, Homo Sapiens
  misc_feature (482)..(482): n is a, c, g, or t
  misc_feature (488)..(488): n is a, c, g, or t
  misc_feature (520)..(520): n is a, c, g, or t
  misc_feature (570)..(570): n is a, c, g, or t
  misc_feature (579)..(579): n is a, c, g, or t
acaattgttaacatggcaacctttaaagccagctcttaaataccaagaccttgaacttgatgcattccacctttctcctctgcccagaaggcagatgggagaataattcaccaaagtttagacacaggtaaattgaggggagggtttcttttttctttttgtttttttgagccaagtcatgctcctgaaaaaaaatgcttactgaggataataaacacctcgagctcaagcagctctcaggagtatgtagtccctgccctgaggccacttatcatctagtttgagaagagacaggtacaaaaatagttcaaacatcaggtgccagcagttcaggggagggatctgaaaaggcagcaaggcactaaatcagcaccccaacctggttttgtgtttgttttcttaaacctgccagcaccaactcttcatcaccttgtcaaattcaagaccatcttggagagacagttaggactgacttgcaatgnctttgngattcttacccaccccatggctggttttctangcctcggccagtgctcctttaaaaaatgatgcaagccctataagtgaccnggaaaaaanggc

SEQ ID NO: 59060 - DNA, 2917 bp, Homo Sapiens
tgtcagtaccacacctgttacgaggtttcctgagagtagcaccccttccataccatctgtttacaccagcatgtctatgaccactgcctctgaaggcagttcatctcctacaactcttgaaggcaccaccaccatgcctatgtcaactacgagtgaaagaagcactttattgacaactgtcctcatcagccctatatctgtgatgagtccttctgaggccagcacactttcaacacctcctggtgataccagcacacctttgctcacctctaccaaagccggttcattctccatacctgctgaagtcactaccatacgtatttcaattaccagtgaaagaagcactccattaacaactctccttgtcagcaccacacttccaactagctttcctggggccagcatagcttcgacacctcctcttgacacaagcacaacttttaccccttctactgacactgcctcaactcccacaattcctgtagccaccaccatatctgtatcagtgatcacagaaggaagcacacctgggacaaccatttttattcccagcactcctgtcaccagttctactggtgatgtctttcctgcaacaactggtgctgtatctacccctgtgataacttccactgaactaaacacaccatcaacctccagtagtagtaccaccacatctttttcaactactaaggaatttacaacacccgcaatgactactgcagctcccctcacatatgtgaccatgtctactgcccccagcacacccagaacaaccagcagaggctgcactacttctgcatcaacgctttctgcaaccagtacacctcacacctctacttctgtcaccacccgtcctgtgaccccttcatcagaatccagcaggccgtcaacaattacttctcacaccatcccacctacatttcctcctgctcactccagtacacctccaacaacctctgcctcctccacgactgtgaaccctgaggctgtcaccaccatgaccaccaggacaaaacccagcacacggaccacttccttccccacggtgaccaccaccgctgtccccacgaatactacaattaagagcaaccccacctcaactcctactgtgccaagaaccacaacatgctttggagatgggtgccagaatacggcctctcgctgcaagaatggaggcacctgggatgggctcaagtgccagtgtcccaacctctattatggggagttgtgtgaggaggtggtcagcagcattgacatagggccaccggagactatctctgcccaaatggaactgactgtgacagtgaccagtgtgaagttcaccgaagagctaaaaaaccactcttcccaggaattccaggagttcaaacagacattcacggaacagatgaatattgtgtattccgggatccctgagtatgtcggggtgaacatcacaaagctacgtcttggcagtgtggtggtggagcatgacgtcctcctaagaaccaagtacacaccagaatacaagacagtattggacaatgccaccgaagtagtgaaagggaaaatcacaaaagtgaccacacagcaaataatgattaatgatatttgctcagacatgatgtgtttcaacaccactggcacccaagtgcaaaacattacggtgacccagtacgaccctgaagaggactgccggaagatggccaaggaatatggagactacttcgtagtggagtaccgggaccagaagccatactgcatcagcccctgtgagcctggcttcagtgtctccaagaactgtagcctcggcaagtgccagatgtctctaagtggacctcagtgcctctgcgtgaccacggaaactcactggtacagtggggagacctgtaaccagggcacccagaagagtctggtgtacggcctcgtgggggcaggggtcgtgctgatgctgatcatcctggtagctctcctgatgctcgttttccgctccaagagagaggtgaaacggcaaaagtacagattgtctcagttatacaagtggcaagaagaggacagtggaccagctcctgggaccttccaaaacattggctttgacatctgccaagatgatgattccatccacctggagtccatctatagtaatttccagccctccttgagacacatagaccctgaaacaaagatccgaattcagaggcctcaggtaatgacgacatcattttaaggcatggagctgagaagtctgggagtgaggagatcccagtccggctaagcttggtggagcattttcccattgagagccttccatgggaactcaatgttcccattgtaagtacaggaaacaagccccgtacttaccaaggagaaagaggagagacagcagtgctgggagattctcaaatagaaacccgtggacgctccaatgggcttgtcatgatatcaggctaggctttcctgctcatttttcaaagacgctccagatttgagggtactctgactgtaacatctatcaccccattgatcgccaggattgatttggttgatctggctgagcaggcgggtgtccccgtcctccctcactgccccatatgtgtccctcctaaagctgcatgctcagttgaagaggacgagaggacgaccttctctgatagaggaggaccacgcttcagtcaaaggcatacaagtatctatctggacttccctgctggcacttccaaacaagctcagagatgttcctcccctcatctgcccgggttcagtaccatggacagcgccctcgacccgctgtttacaaccatgaccccttggacactggactgcatgcactttacatatcacaaaatgctctcataagaattattgcataccatcttcatgaaaaacacctgtatttaaatatagggcatttaccttttggtaaagaaaaaaaaaaaaa

SEQ ID NO: 59061 - DNA, 1692 bp, Homo Sapiens
acttctttacttaaaagataagtttaaaagactctattcatcagttcatgatgatcttggaaatgctgtttctctactcaaaggatatacccacaggcaggtccatggggacttgctctggtgatctctgctattaaggcaaattccagcctgtttgtgccaagaacagagtcaagtgagagagaatgaagactcagagatgtgcagcactggcttgtatgttgtcaggcagaagccttgttcctttctcaagaaaacttcaggcctatcaagcttggaaggaaatacatttttttatgctgatttgcagcctacaccagctgatgaatatgctaggactttgagagaacacaaagcatggtaagttttggtcaggtggaaaggagcctgacatctgaacataatgcttcctctctcaacatctgggatacttttgaaaattcagtaaggcttaatgtaggaaaaattctttacaggaaaagctaattgatctgtttgtctaacctcatagccactccaaaatatgccttttataatggaaaaaaacagtgaacagagagaagagatttggggataagttagaaggtaccctcaaaactactgccgtaaacctacaggtgggcaaggaggaattactgtagtgtctctggagaaagttcttgaacatccaaatcatctcttttctaagcagtttttcccctaatctcataccttacatcttccagcatcatttgctacatcaatgtcttttcatcctcttcatcagccccattgagctgactccagcttatttttgcactgatttccaccatttccttcccacacccatcctttccctctatttaaagcctccatctcaccctcagtaatgctgctgatttactctcagatgtctcaagtctagcttcctttttgaatccttctcctactccaggggctgtcaaaggcagccttaaagttcagtgactgttaggtggctcaggccatttttcattgggtggtctttggtgtttgcatactgaatttgaattcagtttaaaagcaaactgttggatatgaggaagaaagggatatggccttagccctttttccaatatttggaatatgaaagcatattgtgctttgtgtaaaaaatgttttcttctcctattctgctcttgtctttactgaaggtaaaagtattccttaagtagcttttgcaaatttctagtctgatttccacattcattaagttgatttagcagacatgtaagtcagaagtttcacatatcccttgtatcaaacattttatagggaaacctagtaaatttatgatgcttcattttgggctttccagactatttgagttattcaagatagccataatgttttagtagcgacattcttttattacttctaattgccttgtaaaatgcattgttatggcccggcacggtgggtggatcacaaggtcaggagttcaagaacagcctggccaagatggtgaaatgctgtctctactgaaaatacaaaaattagccaggtgtggtggcaggtgcctgtaatcccagctactcgggaggctgaggcagagaattgcttgaacccgggaggtggaggttgcagtgagctgagatcgcaccactgcactccaccctgggcgacagagtgagactatctcaaaaaaaaaagaaagaaaaaaaaaaaaaaaaa

SEQ ID NO: 59062 - DNA, 571 bp, Homo Sapiens
  misc_feature (139)..(139): n is a, c, g, or t
  misc_feature (144)..(144): n is a, c, g, or t
  misc_feature (171)..(171): n is a, c, g, or t
  misc_feature (326)..(326): n is a, c, g, or t
  misc_feature (496)..(496): n is a, c, g, or t
  misc_feature (513)..(513): n is a, c, g, or t
  misc_feature (523)..(523): n is a, c, g, or t
  misc_feature (534)..(534): n is a, c, g, or t
  misc_feature (537)..(537): n is a, c, g, or t
  misc_feature (543)..(543): n is a, c, g, or t
  misc_feature (562)..(562): n is a, c, g, or t
gcacgtagtaacttatagatatatttggaaaactgattatcttttaaaaaatgactactaaacagattaaaatgcagagttcattaaaatacagaggatgcctctggttctctggtattgactctttttgtctactaanataanaagtctgggctaggctgaaaaactcanaatccaggtctggggtttcccagtactatgctcccatttccgagtactgtgctcctatttcccagtactgtgaactcccctttcccagtactgtgggctcccatttcccagtactgtgtgctcccatttctcagtactgtatgcccatttcccantactgtgctcccatttctcagtagtgtactcccatttctcagtactgtgctcccacttctcagtactgtgctcccacttcccagtactgtgctcccatttcccaatactgtgctcccattttgcagtgctgtgagcccccatttcccagtactgtgctcccatttcgcantactgtgctccattccnaatacgtgcncccattccccnaangttgtnccaagtgtttaaaaaaatntccggggaa

SEQ ID NO: 59063 - DNA, 511 bp, Homo Sapiens
cagaataaatgaatttaatcaagaataacacataattgcaatgcagagtatgcaagcctcagtgggtcacaggcatatggtggttgggtggggtggggattgaggaaagggggaattttttttttttgagactggatctcactctgttgcccaggctggagtgcagtggtgcaatcatggctcactgcagcctcgacctcctggggcttaggtggtcttcccacctcagcctccagagtagctgggaccacaggtgcacaccaccacactggactcatttttttattttttgtagagacaggggtttcaccatgttgcccaggttggactcctgagctcaggggatctgcccaccttggcctccaaaagtgctgggattactacaggcatgagtcactgtgccccgcccacgggaaatttcttgttttttattgttttggagacagagtcttgacttgtttgcccaggctggagtgcattgtgtgccatctcggctcactgcatacctcca

SEQ ID NO: 59064 - DNA, 1765 bp, Homo Sapiens
ggaaaacagcagaggtgacagagcagccgtgctcgaagcgttcctggagcccaagctctcctccacaggtgaagacagggccagcaggagacaccatggggcacctctcagccccacttcacagagtgcgtgtaccctggcaggggcttctgctcacagcctcacttctaaccttctggaacccgcccaccactgcccagctcactactgaatccatgccattcaatgttgcagaggggaaggaggttcttctccttgtccacaatctgccccagcaactttttggctacagctggtacaaaggggaaagagtggatggcaaccgtcaaattgtaggatatgcaataggaactcaacaagctaccccagggcccgcaaacagcggtcgagagacaatataccccaatgcatccctgctgatccagaacgtcacccagaatgacacaggattctacaccctacaagtcataaagtcagatcttgtgaatgaagaagcaactggacagttccatgtatacccggagctgcccaagccctccatctccagcaacaactccaaccctgtggaggacaaggatgctgtggccttcacctgtgaacctgagactcaggacacaacctacctgtggtggataaacaatcagagcctcccggtcagtcccaggctgcagctgtccaatggcaacaggaccctcactctactcagtgtcacaaggaatgacacaggaccctatgagtgtgaaatacagaacccagtgagtgcgaaccgcagtgacccagtcaccttgaatgtcacctatggcccggacacccccaccatttccccttcagacacctattaccgtccaggggcaaacctcagcctctcctgctatgcagcctctaacccacctgcacagtactcctggcttatcaatggaacattccagcaaagcacacaagagctctttatccctaacatcactgtgaataatagtggatcctatacctgccacgccaataactcagtcactggctgcaacaggaccacagtcaagacgatcatagtcactggtaagtaattcctggagcatcaacactaagatctggggtacaagctttctggttttcaaataggagcagagaagaaattttcttttgcagcctgtatccaacaggcacaaacaagtccaaattctcccctgaaccctctcaattcatctgtgcagactctcttccctttgtttttctgatttctcacagctgaccttaggtccagcctggaatgtggggagggggttctctcagccccagaaagccccgtgtagcaggaggggcttcacagagggggaagcagaaagggtcctcaaggtcaatttgcttctgtcactaacatgtccctttctgtaacttcttggccttcttttacctattccatgagatataaggaatatgtgaggttttaaaacagactcacaatagttttccctaaatgagagaaggaaatgcccttcatcagggatgagcagctcagactctgctccctgctctactccggcttgcccggtgattcgtctgccctgacccatgtggggtaggacgcaggtgtgtgcagaaggtgtccaggtggcctgtcatgaatccagctaaatcaagatggcagtcaatggctgggcgctgtggttcatgcctgtgatcccagtactttggaaggccgaggtgagaggatcacctgaggtcaggagttcgagaccagcctgaccaacatggcaaaactccatctcta

SEQ ID NO: 59065 - DNA, 542 bp, Homo Sapiens
  misc_feature (385)..(385): n is a, c, g, or t
  misc_feature (535)..(535): n is a, c, g, or t
tttaaacaagtaaagttgttagtatccaggcactgaattataccttcatggtatcaatcaaagctatgatcagaattttatgtaactgcttaatcacttctttaacaagtgtaccgctacaggtaacattaaacgtctctagcaatgatctttatcgggttctcttgccttgactgaaatattattaatacttcttatatccattaacataaaataactttttgttgagcaaaaatagtgtgaaaacattaagatgaatgtgcgctttggaaatgtttaaatagatatgaaatgattaaataaaatcacagtcttgtgcaacatccatagcttacagttatttggcaactatgaaaccacagttactaatggaattaagactttntaaaaaattgcaaatgtacttatttgtatatgaaagaggtattcagctattaactcagtatttaataaacattgatatgtaatttttacttgaaatggcctaaggtttataataccaactagttcatagagctttttttaaaaaagactntttttag

SEQ ID NO: 59066 - DNA, 581 bp, Homo Sapiens
ttttttaatagagacacggtctatgttgcccatgctggtctcaaactcctgggctcaagcaatcctcctgcttcagtctcctaaagtgagccaccatgcctggccggaactcttgttgcaagaacaataagcatccactactgcagctgaaaacatccctgacagacccatctccctggtattcagggagggatggactaggcaatgattcagaagtcatactgaaaagctgcccttttcctactggtgcccctgcagtctgagcccaagcagacacatacttcagaggtgctacatttgtgctacaaagcacagatccttcttgacctggaggccagccttacccactgagaccaggttcctgtagttctccagcatcacttccctgtacagggacttctgtttgaggtccagcagtccccactcttccggggtaaaacccagtgttacatcttcaaaggtcactggttcctaaaaatccagattcttgttcagccacaggccatccgcatccacgacaaaagaaagacaggggaggctgaccaggccagtgaaagcacagaatggtctacaagatgacc

SEQ ID NO: 59067 - DNA, 4944 bp, Homo Sapiens
cgggcggcgtgcggctgctctgggtgtcgctattggtgctgctggcgcagctaggggccgcagcctggactgggccggctcggagagcgtctccgcgtgcgcttcaccccggtcgtgtgcggcctgcgctgcgtccatgggccgaccggctcccgctgtaccccgacctgcgcgccccgcaacgccaccagcgtggacagcggcgctcccggcggggcggccccggggggacccgggcttccgcgccttcctgtgtcccttgatctgtcacaatggcggtgtgtgcgtgaagcctgaccgctgcctctgtcccccggacttcgctggcaagttctgccagttgcactcctcgggcgcccggcccccggccccggctataccaggcctcacccgctccgtgtacactatgccactggccaaccaccgcgacgacgagcacggcgtggcatctatggtgagcgtccacgtggagcacccgcaggaggcgtcggtggtggtgcaccaggtggagcgtgtgtctggcccttgggaggaggcggacgctgaggcggtggcgcgggcggaagcggcggcgcgggcggaggcggcagcgccctacacggtgttggcacagagcgcgccgcgggaggacggctactcagatgcctcgggcttcggttactgctttcgggagctgcgcggaggcgaatgcgcgtccccgctgcccgggctccggacgcaggaggtctgctgccgaggggccggcttggcctggggcgttcacgactgtcagctgtgctccgagcgcctggggaactccgaaagagtgagcgccccagatggaccttgtccaaccggctttgaaagagttaatgggtcctgcgaagatgtggatgagtgcgcgactggcgggcgctgccagcacggcgagtgtgcaaacacgcgcggcgggtacacgtgtgtgtgccccgacggctttctgctcgactcgtcccgcagcagctgcatctcccaacacgtgatctcagaggccaaagggccctgcttccgcgtgctccgcgacggcggctgttcgctgcccattctgcggaacatcactaaacagatctgctgctgcagccgcgtaggcaaggcctggggccggggctgccagctctgcccacccttcggctcagagggtttccgggagatctgcccggctggtcctggttaccactactcggcctccgacctccgctacaacaccagacccctgggccaggagccaccccgagtgtcactcagccagcctcgtaccctgccagccacctctcggccatctgcaggctttctgcccacccatcgcctggagccccggcctgaaccccggcccgatccccggcccggccctgagtttcccttgcccagcatccctgcctggactggtcctgagattcctgaatcaggtccttcctccggcatgtgtcagcgcaacccccaggtctgcggcccaggacgctgcatttcccggcccagcggctacacctgcgcttgcgactctggcttccggctcagcccccagggcacccgatgcattgatgtggacgaatgtcgccgcgtgcccccgccctgtgctcccgggcgctgcgagaactcaccaggcagcttccgctgcgtgtgcggcccgggcttccgagccggcccacgggctgcggaatgcctggatgtggacgagtgccaccgcgtgccgccgccgtgtgacctcgggcgctgcgagaacacgccaggcagcttcctgtgcgtgtgccccgccgggtaccaggctgcaccgcacggagccagctgccaggatgtggatgaatgcacccagagcccaggcctgtgtggccgaggggcctgcaagaacctgcctggctctttccgctgtgtttgcccggctggcttccggggctcggcgtgtgaagaggatgtggatgagtgtgcccaggagccgccgccctgtgggcccggccgctgtgacaacacggcaggctcctttcactgtgcctgccctgctggcttccgctcccgagggcccggggccccctgccaagatgtggatgagtgtgcccgaagccccccaccctgcacctacggccggtgtgagaacacagaaggcagcttccagtgtgtctgccccatgggcttccaacccaacgctgctggctccgagtgcgaggatgtggatgagtgtgagaaccacctcgcatgccctgggcaggagtgtgtgaactcgcccggctccttccagtgcagggcctgtccttctggccaccacctgcaccgtggcagatgcactgatgtggacgaatgcagttcgggtgcccctccctgtggtccccacggccactgcactaacaccgaaggctccttccgctgcagctgcgcgccaggctaccgggcgccgtcgggtcggcccgggccctgcgcagacgtgaacgagtgcctggagggcgatttctgcttccctcacggcgagtgcctcaacactgacggctcctttgcctgtacttgtgcccctggctaccgacccggaccccgcggagcctcttgcctcgacgttgacgagtgcagcgaggaggacctttgccagagcggcatctgtaccaacaccgacggctccttcgagtgcatctgtcctccgggacaccgcgctggcccggacctcgcctcctgcctcgacgtggacgaatgtcgcgagcgaggcccagccctgtgcgggtcgcagcgctgtgagaactctcccggctcctaccgctgtgtccgggactgcgatcctgggtaccacgcgggccccgagggcacctgtgacgatgtggatgagtgccaagaatatggtcccgagatttgtggagcccagcgttgtgagaacacccctggctcctaccgctgcacaccagcctgtgaccctggctatcagcccacgccagggggcggatgccaggatgtggacgaatgccggaaccggtccttctgcggtgcccacgccgtgtgccagaacctgcccggctccttccagtgcctctgtgaccagggttacgagggggcacgggatgggcgtcactgcgtggatgtgaacgagtgtgaaacactacagggtgtatgtggagctgccctgtgtgaaaatgtcgaaggctccttcctctgtgtctgccccaacagcccggaagagtttgaccccatgactggacgctgtgttcccccacgaacttctgctggcatgttcccaggctcgcagccccaggcacctgctagccccgttctgcccgccaggccacctccgccacccctgccccgccgacccagcacacctaggcagggccctgtggggagtgggcgccgggagtgctactttgacacagcggccccggatgcatgtgacaacatcctggctcggaatgtgacatggcaggagtgctgctgtactgtgggtgagggctggggcagcggctgccgcatccagcagtgcccgggcaccgagacagctgagtaccagtcattgtgccctcacggccggggctacctggcgcccagtggagacctgagcctccggagagacgtggacgaatgtcagctcttccgagaccaggtgtgcaagagtggcgtgtgtgtgaacacggccccgggctactcatgctattgcagcaacggctactactaccacacacagcggctggagtgcatcgacaatgacgagtgcgccgatgaggaaccggcctgtgagggcggccgctgtgtcaacactgtgggctcttatcactgtacctgcgagcccccactggtgctggatggctcgcagcgccgctgcgtctccaacgagagccagagcctcgatgacaatctgggagtgtgctggcaggaagtgggggctgacctcgtgtgcagccaccctcggctggaccgtcaggccacctacacagagtgctgctgcctgtatggagaggcctggggcatggactgcgccctctgccctgcgcaggactcagatgacttcgaggccctgtgcaatgtgctacgcccccccgcatatagccccccgcgaccaggtggctttggactcccctacgagtacggcccagacttaggtccaccttaccagggcctcccatatgggcctgagttgtacccaccacctgcgctaccctacgacccctacccaccgccacctgggcccttcgcccgccgggaggctccttatggggcaccccgcttcgacatgccagactttgaggacgatggtggcccctatggcgaatctgaggctcctgcgccacctggcccgggcacccgctggccctatcggtcccgggacacccgccgctccttcccagagcccgaggagcctcctgaaggtggaagctatgctggttccctggctgagccctacgaggagctggaggccgaggagtgcgggatcctggacggctgcaccaacggccgctgcgtgcgcgtccccgaaggcttcacctgccgttgcttcgacggctaccgcctggacatgacccgcatggcctgcgttgacatcaacgagtgtgatgaggccgaggctgcctccccgctgtgcgtcaacgcgcgttgcctcaacacggatggctccttccgctgcatctgccgcccaggatttgcacccacgcaccagccacaccactgtgcgcccgcacgaccccgggcctgagccctggcacccgatggccacccacccgcgcccgccactcggggcccctgccccgcatcctgcagcccgcttagtctgatgacgaggaagcccgccagaaagtccagaagaaggaacgacggacgcaaagcggcgccgcctaccatgcctcccccccccaccaccaccccccccaactgtggtcgtccccgcccggcccaccccgcccccatttctccccccttctttcaataaaaatttcaatcataaaaaaccacctataaaaaaaaaaa

SEQ ID NO: 59068 - DNA, 548 bp, Homo Sapiens
  misc_feature (482)..(482): n is a, c, g, or t
  misc_feature (497)..(497): n is a, c, g, or t
  misc_feature (500)..(500): n is a, c, g, or t
  misc_feature (547)..(547): n is a, c, g, or t
gttttattcagttatcacctccagctttgtacttcagcagctgactttccttcttcactggggagcaaatctgcacttgccttaaatgaatttctatttttgactacttttcaaatttatcacatttttttcctaaagtaccgagaactaacctcatcttgtatttcttgcagcttcccaatgctgagggagtcttagaggcatttgctttgtttttattaggagtatggtttatagtcacccagccagaatgtgatatacaagggtttacaaggaaaagtagaaatgggtgtagatgtatgtgcttgttgtaagaaaaatttacacttacagatgaaagatccatatataatccagccacataccatggaaaggaaaaacaagaagaatatgtaatagtgatggttgccaaaacctatgcaccgtccagtccacaggcagtgttgatcatatcgagcccacagcagttgcatacatggcantggagtgaccctaanggntttcctatctaaaaggggcatttaaaaaaggccttacccaaaacccng

SEQ ID NO: 59069 - DNA, 568 bp, Homo Sapiens
  misc_feature (419)..(419): n is a, c, g, or t
  misc_feature (453)..(453): n is a, c, g, or t
  misc_feature (457)..(457): n is a, c, g, or t
  misc_feature (476)..(476): n is a, c, g, or t
  misc_feature (523)..(523): n is a, c, g, or t
  misc_feature (531)..(531): n is a, c, g, or t
  misc_feature (553)..(553): n is a, c, g, or t
  misc_feature (559)..(559): n is a, c, g, or t
  misc_feature (563)..(563): n is a, c, g, or t
  misc_feature (568)..(568): n is a, c, g, or t
gccatctggggtctctttgctttgctactagacctgacattccccagtcataaggtgggaagatttcatcacctggaaccagctacatcctggatccctggatgggtgacctttactgaaaggcctatgcctatgagctagacgcttcctgcagttcccctgggggcctgggtcttcagtatcaaaaatatctccttgggccatcacagagaccccctctccttgctgctatacccctcccctgaacatttagagtaaaaggattgtgctaagatggtatctcttgtgcttaatgccactgatgatgtgggacagacaagcccaaggtgcttcaaagaggatcaaggacatgagaattggtcccccttagttgtgggacaggattcagcactgcagattaggtcggacaatatcaaagnttccaacttccaagagaaatcaaagaatccttcnttanccaccctgaggcaccattngggcccttcttaaggaaactccttttttgccttgggctcaagcaagncctttggnccggggtacctttaaaaccctntagctntaanagtan

SEQ ID NO: 59070 - DNA, 2484 bp, Homo Sapiens
tcttgaccggcacacacagctcgcttcttcactttcttttccatccactgccggacccaagccagccttccagggagcagccatgccttacctctaccgggccccagggcctcaggcacacccggttcccaaggacgcccggatcacccactcctcaggccagagctttgagcaaatgaggcaggagtgcctgcagagaggcaccctgtttgaggatgcagacttcccagccagcaattcctccctgttctacagtgagaggccgcagatcccctttgtgtggaaacgaccaggggaaatcgtgaaaaacccagaattcattcttggaggggccaccaggactgatatctgccagggagagctgggagactgctggctattagccgccatcgcctcccttacgcttaatcaaaaagcactggccagagtcatcccccaggaccaaagctttggccctggttatgccgggatattccatttccagttctggcagcacagtgagtggctggacgtggtgatcgatgaccgcctgcccaccttcagggaccgcttggttttcctccactctgccgaccacaacgagttctggagcgccttgctggaaaaagcctacgccaagctaaatgggagctatgaagctctgaagggaggcagcgccatcgaggccatggaagacttcactgggggtgtggcagagaccttccaaactaaagaggcccccgagaacttctatgagattctagagaaggctttgaagagaggctccctgctgggctgcttcattgataccagaagtgctgcagaatctgaggcccggacgccgtttggtcttattaagggtcatgcctacagtgtaacgggaattgaccaggtaagcttccgaggccagagaatcgagctcatccgaatccggaacccttggggccaggttgagtggaacgggtcgtggagcgacaggatggcatttaaggacttcaaggcccactttgataaagtggagatctgcaacctcactcccgatgccctggaggaagacgcgatccacaaatgggaggtgacggtccatcagggaagctgggttcgcggctccacggctgggggctgccgcaatttcctggataccttttggaccaatccacaaataaaattgtctctgactgagaaagatgaggggcaggaggagtgtagtttccttgtagccctgatgcagaaagatagaaggaaactcaagagatttggtgccaatgtgctgacaatcggctatgccatttatgagtgccctgacaaagacgaacacctgaacaaagacttcttcagataccacgcttctcgggccagaagcaagacgttcatcaacctgagagaagtctccgaccggttcaagctgccccctggggagtacatcctgattcccagcacttttgagccccaccaggaagctgatttctgtctgagaatcttttcagagaaaaaagccattacccgggatatggatggaaatgtagacattgaccttcctgagcctccaaagccaactccacctgaccaggagacagaggaggagcagcggtttcgggctctgtttgaacaagtcgctggtgaggacatggaggtgacagcagaggaacttgagtatgttttaaatgctgtgctgcaaaagaaaaaggacatcaaattcaagaagctaagcctgatctcctgtaaaaacatcatttccctgatggacaccagcggcaatgggaagctggagtttgatgaattcaaagtgttctgggacaagctgaagcagtggattaaccttttccttcggtttgatgctgacaagtccggcaccatgtctacctatgaactacggactgcactgaaagctgcaggctttcagctgagcagccacctcctgcagctgattgtgctcaggtatgcggatgaggagctccagctggacttcgatgacttcctcaactgcctggtccggctggagaatgcgagccgggtgttccaggctctcagtacaaagaacaaggagttcattcatctcaatataaatgagttcatccatttgacaatgaacatctgaggctgccttgtagagatgcagcctgcccagctgaatcttggcttctggaccttgaccttcagaacttctcttggtgtggaaccattacgcccagggttcactcccctctcatcgtccggccttctcccttcatcttgatctgggaagaatgaaatgaactcagctacactctctgattttgtgctactcctttgtaaagtcactgccttaagggggctgatggcgccacctgtgccttacatccaggttcaggcatcactagctttcccacactctactttccttatttccttccattaagaattactcagagttctaacgcacagaatcctgacttccatgtagctccagtcattgtgatcagacatcctttataaaacatgtttttataaatgtgtatgtggaat

SEQ ID NO: 59071 - DNA, 587 bp, Homo Sapiens
  misc_feature (541)..(541): n is a, c, g, or t
  misc_feature (583)..(583): n is a, c, g, or t
attttgagacgtagtctcactctgttgcccaggctggagcacaatggcacgatctcaactcactgcaacctccgactcctgggttcaagcgattctcctgcctcaatatcctatgagtagctggaattacaggtgtatgcccccacgcccggctaatttttgtattttttttttttttaagtagagacagggtttcaccacgttggcccaggctggtctctaactcctgacctcaggtgatctgctgaccttggcctcccaaagtcctgggattacaggtatgagctaccgcacccagtctaccctcatcatctagattcaacttagtttgcatgattatggagcatgtatttagactccagtatcagattagggatgacgacggatggggtgttaaaacaagttatttaacagattcctaaatttaaaaggtttatataaccacattctaacagtatacataaacactacaaaaaaggacaaagtattttgggggaaccagatcctttaaacatctggattctggtaatataaatctgantaagcagctgattttagattacaattcaattgaaatttttgncgaa

SEQ ID NO: 59072 - DNA, 1596 bp, Homo Sapiens
tttgctctcagcattgtgttagaaaataaagccagcagacaaggattaaaccctcatgttgctgggttccttctagaaacaattggagggctaaccaagtcacctttggtggaaggcagtaaggtgagtcattgctgtggctggactgaataggatagccttagctgtaaaattgggctgacctttcaaatggactcatgcttgccgaatgactcacgctcctgtttacaaatcagctctgtgaagaaatgcagagtgggaggctctgcttgccagacggagaccttagacctccaggggtggagaacggagtacttcctctggtgctcggcttcccttcctgggggcagatctctcagcttctggttggtggctctcaaaatccagacacaaggtcagctgcagccagcgtgggccctggagtagctccagttatggggcagcaatggccccctctcattttgagagctcactttgcctgtggatggttttaatccatctggataaacttgaggcccatgggaataccatatactatggtaaccatgtacactgctctaaagatgtggctgctgttgtataactttttcctttatttttgtcaatttcctattttccagagtcttgcatacccactatgtctactgtgatagtgaacgtaaaaacatacaagatgttggtgttatcctcaatctcttattcttaatcctgaacaaattacatgaaaaaatcgttcatggagtttttcttcatataaaactttttacaatgaacataaagggcatagctatttctttttttttaaaaagaaacgtagaatattatttcttggttgtgaaatcgcccttcttggaccccaagttgttttttacagccctaaattctcttgtttatagagcctgtttatagagccatagacaggccaatgggtctctacagcaggcacctgcatgagttgactgggacctgagctatattccccctctgccatttactagcagtgtgaccttgggcatgctccttacagtctctgagtcagtttcctcctctgtgaaatgggcatgatactacctacctcataaggtaggggtgaggattaatggagtaagaggcacactcctgtccagggccccagacagagtaggccgtcagtaaactgtagcagctattgtgatagggtttgaaattcaaattaacgcatatttcttgagcacccaaggtgtgtgctgctggatctttcaaggggtccagaattggtagtatagttgcttttctcaaaagactgtcgcctggcagaggaaaaggtgttaaggtatgagtgaagacagatcagccagacatggtgccgcttgcctgagatctcaacactttgggaggccgagataggaggattgcctgagcccaggagttcaagaccagcctgagcaacatagcaagattctgcctccacaaaaaaataaaataaaaataaaaagattagctgagtgtggtggcgtgcacctgtagtcctaactgtttgggaggctgagacaggaggattgcttgagcccaggagtttaagtccagtccgggcaacatagcaagaccccatctctt

SEQ ID NO: 59073 - DNA, 445 bp, Homo Sapiens
  misc_feature (169)..(169): n is a, c, g, or t
  misc_feature (425)..(425): n is a, c, g, or t
  misc_feature (437)..(438): n is a, c, g, or t
gagacggagtctcgctctgtcgcccaggctggagtgcagtggcgtgatctcggctcactgcaagctctgcctcccgggctcatgccattctcctgcctcagcctcccaagtagctgggactataggttcccgccaccacgcccggctaatttttttgtattgttagtanagacggggtttcaccatgttggtcaggatggtctcgatctcctgactttgtgatctgcccacctcagcctcccaaagtgctgggattacaggcgtgagccaccgcgcccagctgcacactgtatcattttcatttctctcccttgctgtcccctctgcctctgtccttgcctcccatcatatggacacactgtgcctgacacacacgctcacataatctctccctttttgtttccctagctactcatcaacctcangttttgcgggannaaaactt

SEQ ID NO: 59074 - DNA, 3107 bp, Homo Sapiens
atcgcttgaacccaggaggcggaggttgcagtgagccaagatcacgccactgcactccagcctggccgacagagtgagaacccgtctcaaaaataaattaaaaaataataaaaaataaaacaaagtaggccatagatctaaatgttagagctgaaactacaaaacacttgaagtaaatacaggagtaaatcttcatgacctgagttaagcaaagccttcttagatgcaagaccaaaagcacaagtagcaaaagaaaaaagtagacaaactggacttcatcggagattaagatttgtgcttcaaaggacaccatcaaggaagtaaaaagacaaaccacagaatggagaaaatatgctgctgggactcgccacctcctgccgtgctggtgggggaagcgccaggctgtaggtggggtctggcctggtctctgcccagcaaactggctgtgctggcccgggcaatccctctcctcctgggtctgtttctggggctatggagttgagggtggagccagcagcaaggggacagggctcgctgggggacccgcctgcctgtgctgctgccaggagctctggaactcccaatacctggcagcttctttgcctctcagagttgcagcccttgggtgatgttgcagctcacatttccccatttctgattactgcttgccccacttcctcctgtgtcccctgcacccactggatgggacttggttagtcagctgcagcctgtctcctcacccagggggcgttgcccgaggtcggggcctgatctgcttcccctccacaggcaacccttccattctagttccttcccttcctcctccatgcaggcctcaggtgaacctgttcagccttgcccctccaggagctcagggtctgaaaaggaggtctacagactgtagagccagagagtgggcctggggccctaaagtgcgaggctttggcctggttgagggggtagggccttttggggcactctggttttgttggctccgttcctgaggtgacacccggatcaccccacgtgttaaaccccgagcgcgggctgccctgtgctggatattgcctacatccagcagccctctgagggatggtttctggcctgcctccgttgccagggtcctcactggtgtgaccaaccatctggcttttaacactaaaaagccccacatcctgaggaatcccaggacacagaaagtcctgggttttgtcagtgatgcagaaggttgggtggaaagtatgaaacccacacagagggatgacagcaccatttgtagcatcggatggaaatggcgtggatgatctgcctcgagtggtcactgtcgccatgttgcctgacgtggatgctggcatcaggacttgtgattcaccatggatcacatcactcaggctgcaactccgcacgctgcagtcatgcatgttagcagcacttgcctaggagtctgctgcagattcagtgttgggctttttgtctagacggtgctggtttcagtcttgacatcatgaatattgtgactgtatttcctaagagttcagatgatgaaaatgagaacggtgacaatgacagcaccagcgtgacccaggcatcactgggaaagaaggttaaatgaccatgttactttaatgacagatgcaaggacacacacaactggattagggaggaaagaacccaaacagaatgtactgcgcggtgtgcagaaaagaatgtgagaaatggcatatggagaaggggaggtggaggcacattggacattgagtctctcaagtctgaggcatatctttctaaatcaaggtttttttgacctccaaagagacagcagttctcagtcaaaaacagtggtcgcagaattagcttgggcgcactccttgaatggacgccattatcatcttgttcccttgattgcacggcaaaccaagaaggttacatttcctgattcggaggttacaaactaaaagtcctgtgtgtgaaccaaaggacgagggactttcagtaacagatgcattgcccctttacagtagtgctgaccctgtctgatccttccagcattcgtgcttccgagtgcgtcaagggctgcctgaagtcatggctacaggtttccgctagctcttaggtatgttgatttgaaaactggagtttcagatcgtcttctcgatttctgtgaagattttagtgaagccactgaagacgtaagagattgttgttctcttgtccaaatacaacctagactttgctcatttatctacatatttggcagacagtacacagttaatttgagcaaatttcatttagtccataagcttcttaccaatgaaaatgaaaacatcttacctgctaaatgttcacacctcgtacccgacactgtcacaaaggggtgtaatttgcttacctgtgataccagctttcataatgaaagttttgggtcacctttcggtttcctcaaaacatgccaaagcacttaatgagatctttgactttatagacaggagaatgcctcagacacgtttccacaagatgactatcattgctggccatagaaaagatgttaaaatgttggcttgccatgaaaactgctattttttaaagtgtgagacaagaaggatgtccttctctaatttggaaatgcattgagatgagaatggaaaaaggaattacaataaaatacaggccaggcacgttggcttacgcctgtaacccgagcactttgggaggccaaggtgggaggatcacttaaagccacaaattcaagaccaacctgggtaacaaagcaagacatcctcaccatctctgcaacaaaaaaataaaaataaaaaatacataggctgggcgcggtgactcacacctgtaatcccagcactttaggaggccgaggtgatcagatcacttggggtccgtcgggagttaaagaccagcctggcaaacatagtaaaacaccatatctactaaaaaatacaaacattagctaggtgtggtggtacatgtctgtagtcccagccactcgggaggctgaggcaggagaatcgcttgagcctgggaggtggaggttgcagtgagccgagatcacaccactgcactccagcctgggtgacagaatgagactccgtttc

SEQ ID NO: 59075 - DNA, 366 bp, Homo Sapiens
ccaatatcatagccacaatatttcagtgtgtcctttcaagcctcctttggaattgatgttatttctcatcgtctagactatgttttaatagatgaacaactgcgttcatcttttataactctagaattacaaaaattggtttttaaaaactatcactatatttttaatccttgggttataccttttgaaataagagttgtgttcaatactatatctctctatatttgaaaaaaaaaaataaaaaggcggggtctaattaaataagcccggggggaattcccattgtctggtttatctccctgacactttgacttggttaaccccaactccgtgggcccccatgaagccacgatttgtccgcggtca

SEQ ID NO: 59076 - DNA, 1646 bp, Homo Sapiens
gtgcctagccatcattccattcctcctccttcgcctctcataaaaagaaaatattgtgtacctgcaaacatatgctctgctatcagcattcagacacccaaacaccgaaatcatttagcagctcttactgctgtcagtaagcagatgatggcgtaaggggtttagaatttgatatgtgttttctaaagcatctctcaaaataggcattgtctatttcttgtttgttgcttgtgggaaatttttcgtcaagtgtacctgtacctaacccatgactaaaacttacctagatcttaatttctagatttaaaaagaagaaaaaagggatcaagtaaggaacagcgaagtaaagaatatctaagattaaaagtaggaatagctacaattacctagatttcaatttctgggttatttttagtgtgacaaagtaaagagtgtccaaaattacaaatctgagggataattcaaagatccttttttgttgtcattgttcctgggggaatatgtttcctgggggaaggagcatatctgactggtcccagggaagaaatgaagtagaactggtattgaagagatatctttctatgggaatccagcaaaaatactgggttccaagaacttgcttgcctggggaactcccagattctttaaaaaccttacatgtgaaatagcttaacataaatatataggtttagacatactgattgatgtttcagtgcctatttttatatgcatttatatcgctcaggtcatctattttccacttgttctattaagtcatggttttgcaaatggtcaccatttaaatataaggaagggacctattttgcttctttcatattcttcgacatttcctcaatgaaagaataaggaaagtttaggagtgagttacttagggtgtattctactctgaggatttcagttttactatagctgtatttaatcttatattaattgggcacttatattaatttagtgcctgtataatgttggcactgaaatggttctttagtgtgttgtgagaaaatttcaatgaagtcatttatagaaaactgtttttctcaagggaatttccctttccccttttcagaagtcagaggaaaaaaaaactggaattagagtatagagttagagataaagcgaaacgatggcagaatatgctgagacatttgctcaggggttaaaagacagggagtttatagaactcccttttctgcttgtcataaggttatctgttccttcttttggacatctctctagaggtgttcccaagctttgtatcacagattcttttatcgtgggggtcctaaactttaaccatttaaaaataaaaaccaagggttaccaaacaccttaatagagacttctctatgaagttacaagaagtaaacaaccatatggaagaatttgatgtgttctttgaagtcactgcttgtaagagaagacaacgtgtaatttttgagttactgtatgactcacgttggaaatgtttaaagccttctgtaggcatggtgtggtggctcacacctgtaataccagcactttgggaggccgaggcgggaggatcacttgcacttaggagtttgagaccagcctgggcaacataatgagactttgtctctacaaaaaaaaaaaaaattaaaaaaatt

SEQ ID NO: 59077 - DNA, 1284 bp, Homo Sapiens
ggcctgtacattttcaaggaattcttgagaggttcttggagagattctgggagccaaacactccattgggatcctagctgttttagagaacaacttgtaatggagccttcatctcttgagctgccggctgacacagtgcagcgcattgcggctgaactcaaatgccacccaacggatgagagggtggctctccacctagatgaggaagataagctgaggcacttcagggagtgcttttatattcccaaaatacaggatctgcctccagttgatttatcattagtgaataaagatgaaaatgccatctatttcttgggaaattctcttggccttcaaccaaaaatggttaaaacatatcttgaagaagaactagataagtgggccaaaatagcagcctatggtcatgaagtggggaagcgtccttggattacaggagatgagagtattgtaggccttatgaaggacattgtaggagccaatgagaaagaaatagccctaatgaatgctttgactgtaaatttacatcttctaatgttatcattttttaagcctacgccaaaacgatataaaattcttctagaagccaaagccttcccttctgatcattatgctattgagtcacaactacaacttcacggacttaacattgaagaaagtatgcggatgataaagccaagagagggggaagaaaccttaagaatagaggatatccttgaagtaattgagaaggaaggagactcaattgcagtgatcctgttcagtggggtgcatttttacactggacagcactttaatattcctgccatcacaaaagctggacaagcgaagggttgttatgttggctttgatctagcacatgcagttggaaatgttgaactctacttacatgactggggagttgattttgcctgctggtgttcctacaagtatttaaatgcaggagcaggaggaattgctggtgccttcattcatgaaaagcatgcccatacgattaaacctgcgagatcggagttctttaattaggaatggaatgcaacagatttggacaagtcaaggacaagagctttagagagaccaaagagtttttcactgttaaagtgtccagtatgtagccgagaaccatatggagaacatcaaatacagtggaacaaatgtaactgctattgatgtcacactttgtgaagtagtctttgttgcttaaaaagggtgacatctagtggctaaacatgttatttcaaataaataatatcgaaataaaaaaaaaaaaaaaaaaaaaaaaaaaaa

SEQ ID NO: 59078 - DNA, 1674 bp, Homo Sapiens
tttttttttttttttttttttgcaggggaccctagaatagtttttctcctgccatttctatgaatgtctgaacgtgcaaatatgtcaatgactagggaaaatatagtgacgcactggtcattctacaactttaagtctacacaggttccttcatcaaaacagggcattaaaaacaactaagctatagagccagatcactggaggtactgtagtttataacctgcttataaaccccagttcttaagtccctcaatgcctagcatgctacctaccaatacgcatacaaataaatcagacgatcttgtgccccccagcccaatgtttaccaagacttcaaaatgttctggtgagatcacctccctgctatgtgatgcaaacatcagagtataaatcttttcagaaaactttttaacaactgttggaaattttaaagataaaagcaatacaggtcaagcagacccctgaagaacctctggagcaccacatggtgctggcaccagctctgcccccgactcccttcatcaactcaggcacctcccttcacctctgtaaagctaggtggcttgaactccataatctctgacgacaccatctgccgaatccacggcaaggacacacagaaccagagaggctacttcattaagctgcagtgtgcatttacatcaaatcaaccattccatagtaacaaggcaatatgaggccatctttttaaaattccataggagaatttaagtaaattgctagatccttccagttttttctgtgtgaatgatttatcccagcttctaggaatatgtgcaatattattccacagagcacatctttcagaatcttgtttcagattattgttacttaaatagtccatttctcctgaacagcccttcaggtaagagacattcaatactcattagaatctctactctcatgatgcattgtatgatctgagaaccaacttacatggtacaagtatagacacataacatcaaagaagatacacaatggccaagattctggtttcattagttaccagggaaatataaattaaaccacaataagattccattacacacccagtaaaatggctgataatgccaagcaccgatgaggaagtgaaggaactggaactctcatacgtggttagtggaaatgaaaaatgatgcagccactttggaaaatgggatggcagcatttgataaagttaaacacacacttagcacacaacacggcaattgcactctcaggtatttcccgaagtcaaaatataaaacgtgtctacctacacaaagacttgtagtcaaatgttcatagaagctttatccataatagccaaaaactggaaagaacccaaatgcccatcacttggtgaactgataacaagtagtaccgcttatcttcagggaatacattccaagactcccagtggatgcctgaaaccagacagtaccaaatcctgtatatactgggttttttttttttctatacacacatacctctgataaagtttagtttataggccggggacggtggctcaaacctgtaatcccagcactttggaggctgaggcaggagaatggcatgaacccaggaggcggagcttgcagtgagccgagatcacgccactgcactccagcctcgcgacaaagcgagactccgtctcaaaaaaaaaaaaaaaaa

SEQ ID NO: 59079 - DNA, 1140 bp, Homo Sapiens
ggcacgagcagcgactttaggctggataatagtcaaattcttacctcgctctttcactgctagtaagatcagattgcgtttctttcagttactcttcaatcgccagtttctggatctgcttctaaaagaagaagtagagaagataaatcctgtcttcaatacctggaaggaaaaacaaaataacctcaactccgtttcgaaaaaacattccaagaactttcatcagagattttacttgaacagcagtctcagcggttagcagcacaagagatgatttacacaatgaagaaagtacatgcactttgggcttctgtatgcctgctgcttaatcttgcccctgcccctcttaatgctgattctgaggaagatgaagaacacacaattatcacagatacggagttgccaccactgaaacttatgcattcattttgtgcattcaaggcggatgatggcccatgtaaagcaatcatgaaaagatttttcttcaatattttcactcgacagtgcgaagaatttatatatgggggatgtgaaggaaatcagaatcgatttgaaagtctggaagagtgcaaaaaaatgtgtacaagagataatgcaaacaggattataaagacaacattgcaacaagaaaagccagatttctgctttttggaagaagatcctggaatatgtcgaggttatattaccaggtatttttataacaatcagacaaaacagtgtgaacgtttcaagtatggtggatgcctgggcaatatgaacaattttgagacactggaagaatgcaagaacatttgtgaagatggtccgaatggtttccaggtggataattatggaacccagctcaatgctgtgaataactccctgactccgcaatcaaccaaggttccaagcctttttgttacaaaagaaggaacaaatgatggttggaagaatgcggctcatatttaccaagtctttctgaacgccttctgcattcatgcatccatgttctttctaggattggatagcatttcatgcctatgttaatatttgtgcttttggcatttccttaatatttatatgtatacgtgatgcctttgtagcatactgctaataaagttttaatatttacatgcatagtaaaaaaaaaaaaaaaaaaaa

SEQ ID NO: 59080 - DNA, 2278 bp, Homo Sapiens
agttttgctccgaaagacttaccgaggagggagcttgcggtgcgttctgggaaagttgctgggccagctcctttgtttccagtctgagcgttgcgttcggtttcccgagggtcttctgaggcaccgcggctgcgggcttctgagttcccggctctccgcagggaagcctcctcttcgtacctcgttttttggctcgtggggggtcctcccaccgctggccgacgcagccagcatgtccggggtgcgcgcagtgcggatcagcatcgaatcggcctgcgagaagcaggtccatggggtgggcctggatggcaccgagacgtacctgcccccgctgtccatgtcgcagaatctggcgcgtctggcccagcggatagacttcagccagggttcgggctccgaggagggggaggcggcggggaccgagggggacgcgcaggactggccgggcgccgggtccagcgcagaccaggacgacgaggaaggagtggtaaaatttcagccttccctttggccttgggactcagtgaggaacaatttgagaagtgccctgacagagatgtgtgttctctatgatgttctcagtattgttagggataaaaaatttatgactcttgatcctgtctctcaggatgcacttcctccaaaacaggtatttgtggactttaattgaataataaaattttatttattaaatcccaggacccttttttggctttgtgcttgttgttccattttcctttcttgcaaaattaagtccagatgaagatttaaagactaactggtctaaaacaaagccatacaactgcatttcctttatttttttattatatacctatgatccttggaagagttaagtttcattaagaatgtaatacctttaaggccaggcgtggtggctcacgcctgtaatcccagcactttgggaggccaaggcgggcagatcacgaggtcaggagatcgagaccatcctggctaatgctgtgaaaccttgtctctattaaaaataacaaaaataagccaggcgtggtggtgggcacctgtagtcccagctactcagaaggctgaggcaggagaattgcttgagcctgggaggcgggggttgcagtgagctgagatcgcgccactgcactccagcctgggcgacagagcgagattccatcccaaaaaaaaaaaaaaaaagaatgtaatactttaaaggttaccaaatcttaacaaattcttatagcctgggtccttggtctgtgatatattacacaaaaatgtgatgatataatggctttggaatcaggtagacctggattcgaatcctgcctctgccttcattaactgtgtgaccttaaattaagcaagttattttctcttaagtccctgtttttccatctaatccttccttccctttttttttaagggatggattagaaaagttaggcgaaattatggagcatattgagagctgggtagaattgctgctatttcataaacagtgtattcaatttttgaacatttgaagatgaaagagaagtagcaggaagatgagttggtgaatagtctgaaatcattgaggctacttgggtccttaaggaaaacaagtgtcaagaccataaccaaattagtcatggagaagaagtaatgactgttagaacccatttgtaaataaaattaattgagtagaattactcacatagtaatagtttcaggatctagaaacattgtgctgggggactaatagagttccctaaatctgcattcttcattttatagagagaaaactaaagcttaaagagatttgtaatatgttcaagttgctgtcaagccagtagttagggagccaagactagaactccagcacctaactcatagccccactgccttttctactattctgtgcttttcccagaagggagtctccaggaatttcttaatatctccaggaactcttttatttacgttccctaatgcaatcaaaagattattttgatatgtttatgaagctttttatgtgatttttgactctcatacagccagaaaactgtattaaactggttagtaaaatacacaaattatggtgattgtggatatttatatatgcatatgtgatacatagatagtgtcttctgatcagttttccaaaaaattaggattcagtgaagtacatttaatattaacaatggcagggcacggtggcttatgcctgtaattccaacactttggggaaccaaagcaggaagccaggagtttgagactttcccaggcaacatagcaagaccctgtctctacc

SEQ ID NO: 59081 - DNA, 1582 bp, Homo Sapiens
aattatggcgacctccgcgacgtcgccgcacgcgcctggttttccagctgagggtagatgcggttactatgtggaaaagaagaaacggttctgcaggatggtggtggccgcagggaaaagattttgtggtgaacacgctggagccgcggaggaagaagatgctcggaaaagaatcctgtgtcctttagatccaaaacacacagtatatgaagatcaactagcaaagcatttgaaaaaatgtaactcaagagagaaaccaaaacctgatttctatattcaagatattaatgcaggcttaagagatgaaacagaaatacctgaacaattagttccaatttcttctctatctgaagagcagttggaaaagttaattaagaaattgagaaaagcaagtgaaggcttgaattctacacttaaagatcatattatgtcccatccagcattacacgatgcacttaatgaccctaaaaatggcgattctgcaaccaagcacctgaaacagcaggtatgtttaggctatagtaactactaaacatggcctttgttcatttgttaaaactgttttaaatgtaattattaataagattttattttgtttacctttgagggtaccaaatatttccatttcaaaaatatatagaaacatatacaaaaaattgagggcatggatgtgattctgagtaccgtatattaaatatttaaaggcaagagagaaaaattttaagtcaaatacaaattatcaatgtaagcatactgccttatgcagaaattaccttgctgttttcccatttgaaccaaatgtgtttactctagtttataaaataatcttgtgaagtttgcaggcttctattttaggtaacattgaaaatttaaagttacttggtccaagaagatgctttgttgagtttggagcgggaaagggaaaattatctcattgggttgatattgccttaaaagatgctgaaaaagttcacttcatcctagtggaaaaggtgaccacaagattcaaggtggatggaaaacacagaaagaaaaattcagtgtttgaaagacttcaaattgatattcaacacttgtgtttgaacaagattcctgtgttaagagaagaaaaactacctgtggtaggaattggaaagcatctgtgtggtatggcaacaggtacgtaaacatactgataatgtttacattaatgcattaagttttggcctaacctggccccaaccatttcagtggtctcttttgaatagatatcttatgtttacaactcaataatctttatagagcactggccctgtgctttattagatgcatagctttcctatttatctgctcatattggccattttgcaggatgaattaagagttttgtatgtaaatactgcatcacattagaccttaaagttctttgggttaaatttcaaccagaaaaggaaaataagaccatttatggaaactgtatgattccacctagaagctactgattttttagagtagttgcttagaaagaactcagaaacctcttctactaaaagactattgtgtttcaggattctggggaaaaagaaaaaaataaatgttagac

SEQ ID NO: 59082 - DNA, 1383 bp, Homo Sapiens
ggagcgagctggcggcgccgtcgggcgccgggccgggccatggagctgtggccgtgtctggccgcggcgctgctgttgctgctgctgctggtgcagctgagccgcgcggccgagttctacgccaaggtcgccctgtactgcgcgctgtgcttcacggtgtccgccgtggcctcgctcgtctgcctgctgtgccacggcggccggacggtggagaacatgagcatcatcggctggttcgtgcgaagcttcaagtacttttacgggctccgcttcgaggtgcgggacccgcgcaggctgcaggaggcccgtccctgtgtcatcgtctccaaccaccagagcatcctggacatgatgggcctcatggaggtccttccggagcgctgcgtgcagatcgccaagcgggagctgctcttcctggggcccgtgggcctcatcatgtacctcgggggcgtcttcttcatcaaccggcagcgctctagcactgccatgacagtgatggccgacctgggcgagcgcatggtcagggagaacctcaaagtgtggatctatcccgagggtactcgcaacgacaatggggacctgctgccttttaagaagggcgccttctacctggcagtccaggcacaggtgcccatcgtccccgtggtgtactcttccttctcctccttctacaacaccaagaagaagttcttcacttcaggaacagtcacagtgcaggtgctggaagccatccccaccagcggcctcactgcggcggacgtccctgcgctcgtggacacctgccaccgggccatgaggaccaccttcctccacatctccaagaccccccaggagaacggggccactgcggggtctggcgtgcagccggcccagtagcccagaccacggcagggcatgacctggggagggcaggtggaagccgatggctggaggatgggcagaggggactcctcccggcttccaaataccactctgtccggctcccccagctctcactcagcccgggaagcaggaagccccttctgtcactggtctcagacacaggcccctggtgtcccctgcagggggctcagctggaccctccccgggctcgagggcagggactcgcgcccacggcacctctgggagctgggatgataaagatgaggcttgcggctgtggcccgctggtgggctgagccacaaggcccccgatggcccaggagcagatgggaggaccccgaggccaggagtcccagactcacgcaccctgggccacagggagccgggaatcggggcctgctgctcctgctggcctgaagaatctgtggggtcagcactgtactccgttgctgtttttttataaacacactcttggaaaaaaaaaaaaaaaaaaaaaaaaaaa

SEQ ID NO: 59083 - DNA, 1319 bp, Homo Sapiens
tacaggttgattcacagtgggagagagccatgttcagaatttttttctgatagcctgaattttcttcttgtctttcatgtctttgcttctatttatgttctttgtacctcttcttccttgaacttggatcttctgcatagttgactctattatatcatctttggggctgcagaataaaatgtggaagattttaaagttaaggttcccagaataatgttgtcgcccacattgcacatatgtcacattttgagtttactagttaagcctctaaatatgcactttatatacaatatgcgcagtgcgatgatttaggttgccatgagaacctaaaaattttaggcttaaatggttcggtaacagacactttaaaattatcttagatgaaggctaattttttcttttatatactctttacaaactgaggcataaggcaatagctgttctcatatagtacttctgctgacaggttgggtggcttctttgtttgcctacctgttatcagtccccttcattccagtctttcatactctggtgtcctgtcccctgcccaagtatttgtctctcttttttttttaagtcttaccctgttgctcaggctggagagcagtggcgtgatcttggatcactgcaacctccacctcccaggtttaagcagttctcctgcctcagcctccccagtagctgagattacaggtgcctgccaccacacccagctaattttttttttcccgagtcggagtctcgctgtgttgcctaggctggagtgcagtgacaggatctcggctcactacaacctccacttcctgggttcaaatgattctcctgcctcagcctcccaagtggctgggactatttttgtatttttagtagagacagggtttgccatgttggccaggctgctctcgaactcctggcctcatgtgatcttctcgcctcggcctcgcaacgtgctgggattacaggcgtgagccagcatgcctggccactaatttttatatttttagtagagattgggtttcgccacgttacccgggctggtctcgaacttctgacctccagtgatccacctgcctcagcctcccaaagtgctgggagccactgtccccggcctcgtctcctactttctttgctccaaggtaggattagaagtagaaactggagccaggagctatagtgccagctacccgggaggctgaggtgggataattacttgaacctgagaggcagaggttgcagtgagctgagattgcgccactgtgctccagcctgagctacagagcaagactctgactcaaaaaaaaaaaaaaaaaaaaaaaaaa

SEQ ID NO: 59084 - DNA, 2368 bp, Homo Sapiens
ggcacgagggtgagccacggcgcccggcatccaggctagtcttgaactcctgacctcaagtgatccgtccgcctgggcctcccaaggtgctgggattacaggcgtgagccaccgcgcccggccaggttgtgggttttaatgggaccatctcactgcctaccgtttcctttttccgtccgaacagaaggggcctgagcagtgaactgacagtggcaacgccgggtgaggcgggatggaggagtttacgagcctgggtgacgccctgttccgcgtcctggccccgcccctcccggcagagccccttggcgcgtgacacaggccccgcccttgctgtacgccatcagccggcgccgcgccgccgggtgttactttgccccgccggcggggcggtcagcctcctgtcaccgcctgttccggctatggtcccgtccggtgttctgtaagttggcaacctaggctcctgacgcgaccctggtcctgatggcggcggcgacggccgcggcagccctggcggcggccgatccccctcccgcaatgccgcaggcggcaggggccggagggcccacaacccgcagagacttctactggctgcgctcctttctggccggaggtgggtccatgccacgaagagccagccgcgctctgagtggcgggggcaggactgtgggcaagtgggatgcaagcggcctctatgacattcctggactctggctgcttcaatgttctgttagatgtctgccctgacctgctgtaacctctttctagtaatcacttgactaatgacagctaggttatggggagtgggacctttggcactccggcagaggctggggaggtggaaggtctgaatcaggcacccattcttcagggctggataacagggaaaagaggaggatcccttacagagaccctggggttttagtgtagacttggattttgctgtttgcttaaaggaaaacaaatattggagatcagctttttaatgactactggaaaattgtgcaaactgtctacagccaaaactggttccagtgattctagtaaactgtgacacagtacttgacaagccctattattgatgtgactttgggatcaaaaagttcatattgtctcttaggaatttcctgggccttcaagctccacccttccttaattacttctctgggttgtgtaggggtgggttgcccctccacacctgtgggtgtttctcgtaaggtggaacgagagacttaggaaagaaaaagacacagagacaaagtatagagacagaaataaggggacccggggaaccagcgttcagcatatggaggatcccgccagcctctgagttcccttagtatttattgatcatttgtgggtgtttctcgaagagggggatgtgtcagggtcacaagacaattgtggggagagggtcagcagacaaacacgtgaacaaaggtctttgcgtcatagacaatgtaaaggattaagtgctgtgctcttagatatgcatacacataaacatctcaatgctttacaaagcagtattgctgcccgcaggtcccacctccagccctaaggcggtttttccctatctcagtagatggagcatacaatcgcgttttataccgagacattccattgcccagggacaggcaggagacagatgccttcctcttgtctcaactgcaagaggcatgccttcctcttatactaatcctcctcagcacagaccctttacgggtgtcgggctgggggacgttcaggtctttcccttcccacgaggccgtatttcagactatcacatggggagaaaccttggacaatacctggctttcctaggcagaggtccctgcggccttccgcagtttttgtgtccctgggtacttgagattagggagtggtgatgactcttaaggagcatgctgccttcaagcatctgtttaacaaagcacatcttgcaccgcccttaatccattcaactctgtgacacagcacatgtttcagagagcacggggttgggggtaaggttatagattaacagaatctcaaggcagaagaatttttcttagtacagaacaaaatggagtctcctatgtctacttctttctacacagacacagtaacaatctgatctctcttgcttttccccacaggttgtcattacttaattatttaagattcaaaaatttaaaaattccacattgaagttgtgtgcagtggctcactactgtagtcccagttactagggaagctgaggcaggaagactgcttgagtccaggagatcgaggctccagtgagccatgatcacaccactaccctccagcctgagctacagagagagaccctctcctaaaagaagaaaaaaacaaaaaaaaaaaaaaaaaa

SEQ ID NO: 59085 - DNA, 2546 bp, Homo Sapiens
gctgccgctgccgcacctccgtagctgactcggtactctctgaagatggcagaagctcaccaagctgtggcctttcagttcacggtcactccggacgggattgacctgcggctgagccatgaagctcttagacaaatctatctctctggacttcattcctggaaaaagaagttcatcagattcaagaacggcatcatcactggcgtgtacccggcaagcccctccagttggcttatcgtggtggtgggcgtgatgacaacgatgtacgccaagatcgacccctcgttaggaataattgcaaaaatcaatcggactctggaaacggccaactgcatgtccagccagacgaagaacgtggtcagcggcgtgctgtttggcaccggcctgtgggtggccctcatcgtcaccatgcgctactccctgaaagtgctgctctcctaccacgggtggatgttcactgagcacggcaagatgagtcgtgccaccaagatctggatgggtatggtcaagatcttttcaggccgaaaacccatgttgtacagcttccagacatcgctgcctcgcctgccggtcccggctgtcaaagacactgtgaacaggtatctacagtcggtgaggcctcttatgaaggaagaagacttcaaacggatgacagcacttgctcaagattttgctgtcggtcttggaccaagattacagtggtatttgaagttaaaatcctggtgggctacaaattacgtgagcgactggtgggaggagtacatctacctccgaggacgagggccgctcatggtgaacagcaactattatgccatggatctgctgtatatccttccaactcacattcaggcagcaagagccggcaacgccatccatgccatcctgctttacaggcgcaaactggaccgggaggaaatcaaaccaattcgtcttttgggatccacgattccactctgctccgctcagtgggagcggatgtttaatacttcccggatcccaggagaggagacagacaccatccagcacatgagagacagcaagcacatcgtcgtgtaccatcgaggacgctacttcaaggtctggctctaccatgatgggcggctgctgaagccccgggagatggagcagcagatgcagaggatcctggacaatacctcggagcctcagcccggggaggccaggctggcagccctcaccgcaggagacagagttccctgggccaggtgtcgtcaggcctattttggacgtgggaaaaataagcagtctcttgatgctgtggagaaagcagcgttcttcgtgacgttagatgaaactgaagaaggatacagaagtgaagacccggatacgtcaatggacagctacgccaaatctctactacacggccgatgttacgacaggtggtttgacaagtcgttcacgtttgttgtcttcaaaaacgggaagatgggcctcaacgctgaacactcctgggcagatgcgccgatcgtggcccacctttgggagtacgtcatgtccattgacagcctccagctgggctatgcggaggatgggcactgcaaaggcgacatcaatccgaacattccgtaccccaccaggctgcagtgggacatcccgggggaatgtcaagaggttatagagacctccctgaacaccgcaaatcttctggcaaacgacgtggatttccattccttcccattcgtagcctttggtaaaggaatcatcaagaaatgtcgcacgagcccagacgcctttgtgcagctggccctccagctggcgcactacaaggacatgggcaagttttgcctcacatacgaggcctccatgacccggctcttccgagaggggaggacggagaccgtgcgctcctgcaccactgagtcatgcgacttcgtgcgggccatggtggacccggcccagacggtggaacagaggctgaagttgttcaagttggcgtctgagaagcatcagcatatgtatcgcctcgccatgaccggctctgggatcgatcgtcacctcttctgcctttacgtggtgtctaaatatctcgctgtggagtcccctttccttaaggaagttttatctgagccttggagattatcaacaagccagacccctcagcagcaagtggagctgtttgacttggagaataacccagagtacgtgtccagcggagggggctttggaccggttgctgatgacggctatggtgtgtcgtacatccttgtgggagagaacctcatcaatttccacatttcttccaagttctcttgccctgagacggggattataagtcaaggaccaagttcagatacttgagacaaagtggaaagtctcagcatatggaaacaaggccttggaggagaccatggacatcaccaagttcatgtgctgggctggaaagaaaagcctgttgattttcacttgctgtgcatttattcatccattccattgcctcaatgctgagaacagtgcctgacacataaaagatgctcaataaatatgttaaaagtaaaaaaaaaaaaaaaaaaaaaaaaaaaaaaaaaaaa

SEQ ID NO: 59086 - DNA, 168545 bp, Homo Sapiens
gaattcacatgagtgagtggccacagaggacccgaacattcacagcagcaatattcacagtgaccaaaagtggaaacagcccgaatgtccatcaactggtgaatggaccaataaaatgtggtctatccgtacagcagaatatttggcaataaaaagaaatggaataccgatatgggctacacatggaggcaccttgagaatatgctaaaagaaagaagtcagccaccaaagaccacatatgggatgattttatttatatgaaatgtccagaatgggcaggtccatagacacaaaaagtggatttgtggttatttagagttgaggagtgggcggggagaagtgggattgcctatcagcaggctgtttaaaaggggggatgaaatgttatagaatttgattgtggtaatggttgcataacctaatgaatagaccaaaaacatcgacttgtatacttcatgtggttgaactgcacagtatgtgaattagatctcaataagctggtttttaaaatggcaaaatggaatagaaggtggtctgggtggcactactattcccatgattccaaaagtgacacaacagaagtggctccaagattttagaagaaaaatcccctggggcacccaggcaagcaggggaatgagggcagctgtgaggttctgtagatgccaccagcacctctcctgctgtgccaccccccaaacctcacaccaccctcaaagcaaatagggccaacccactgctggcacactgcttttcagtgacttgttttcccttccagggtgtctcccaagcttattctaacttgaattgatctgtcttaaaacaactcaggagtgaccggggcagtgaggtgggattactgtgtgatttgtcccaagatacactgggagtgtgtgtgccactcaggactattttttaaaagtttccctaataatcaacagctcaagaaaatgtagcagttagatccatgatgactgtgggaggacagtgagttctaggtatttgtgtgaggtgtctgaggaaacattgcagaagcaatggaaatgtctggtagttttaccgataaaaactgtcttgtccccagaaaggaattttggcccataattaagatacttcctatatgtgaattatttctgtggtgctccttttgaattgcaaagtaggcaaccctttagctaaatttctcagttatccgtgccaaagtggcatggtctttgccactgtataaattgtacaggccatacattctagaaaacagtcctttctgccttcagggagggacattttgccattgccactgaagaagggctcctctcccccactgggttgttcattcctgtgggtgggtcccccacagcaggcacggagaggcagcggggctgtagggtggagcaatgagtcctgtctgagaatggagaggcctaagtgctcgagctctggtctggacatgaccagccacctggtgatggaaaaaccagcctgcctccattcctcaactgtcagagaaatcttgccccatgggaggggggactctggggaaagtgtgcagtaaactgcaaatctctacatgtacataaagaatggtgacagttcacagagagtcctggagaccatttttgtaagagtaaaaaaagctagggagccttgcctcccatccttgcccttctgtgtcactgagttgtttaaagtctcttgaatcactttctgtgtagtggggatggccatctgcgcgattcttcacgcacacgcgtgctcatgaccactggaacttacagggatctgcagggtcttgagggcagggcgggacacgtggctgagctccacgttctgcctgtctgggcaatccaggacaggggctatgttctgtggtgctggagtgagggggcaccgctgagggcccctctagtgccccccagggaatgttcaggcagaacacctattgtataagcataacatctgttcattcaccagacacatatgacatacctgttgcgtgcccagagatgggaatacatggcgagtaaactgtcatggaagttgtcccccatccccacagtgcaccctccccactgaagcctgactgaccttcgtggaagagtcatatcacagcactctgctgcttcacatctttgtgtgctgcccatctcaccagagcaagagccaaggtcttgccctctgcccgtaaggccactctgaccttcctgttcttcctgcccaccctggctcactcagctctaaggaggctgggctccttgttccttgattgtgccaggaaagtccctgcctcaggcccttccacctgctctttcctgcccctccttccttgtcatttctcacacgccgccttttcagggaggccttctctgaccccctattttaaagtgcgcccccaccccaggtgtgttggattttctcagtggcactcccaaggctctttccctgttgtcttttctcctcagtactcttcagctcctgagagcagacactgccgtctcctttcccgtctggaaggtgagcctccagtgaaggaagggctgctgtctgtcttgcccatctctgcaactggcatattcagtgtttggtaaacatttatgggatgaatgtctgaaaacccactttcgtgggctttatgagatgctctgaggagtgaagctgcagttcgcatctacttaaattgtagcaaaggtgcatccctctgtgtccccgggtcttaagtggacctgagttttaatatctcaatttggcctctggcaagttgctagctttgggtaagtgggagaaagagcagagtcagcctagcgggctacagatttccacttctggcctcctccttccttctccgtggtgatctatttcctctgggactctcacatgtgatgctgttgggtcagcgactgtcaccctggtccggagcgcccagcctcacgaagctgcatgcccagatgttacctggaggctgtggtgctaactggagttgcgctgtttctccagctgcttctctgcaccctagggatgtagctagggagcagggcttccctaatgactgcacgtgggctctgggatgcacgctgactgcagagtctacccatacacattcagcagcactggcaaggcaaggtgtgcacacttcctgttttgcctgagattaggggtatgggggagtggaaccttcccaagccatacccatgattccttttccatatcctcaggcaatctcacagatcacacaatcccacacaggagaagacagatgctgggatggtggaggccactggttcccaccacaggtcacagctgagtgctgcgggaaaggcaagaggagcctctgcgtgggggcacaggtaggtggaacgtgtcctctatgcatctggattttattgtctcatattcttgaagtggccacaaaatagaatagggttttccctattctttctcggcattgtctactgtgatgctactaggtttcttgtgtactgagaagtgaatttggccacatcaatgctgtaaatatgtaaagttacttatttcaaatggatgggcatgtttcccatttttaagggattttattccttctgctgtttgagggactttaaaggctaatgggcaaaaaggaaccggcaggtttagttcctgttatcatcctatatcttcctggaaaagggtagtacaaaatattctttcttctttctgtcagaagacttaactgcgaataagagaggttccatttggcctctgctttggtttggctgttcctaaacaggaatttgagcaaaaccactgagtcttctaggaggcccctcagcagctgaggttgtgcatgcaccacctgctgagccaggaggacttgagggccagtcacgattcacaaggaatgtgaacccggggtgtcgggagcttcaggttcttctgaaatacattctcaaggttatttcaaataagctttaattaagagttatttccaaaaattgtctctgagaaaaattcctggtacctgccagccatctcttggcaactgctaaagcgtcccctgagctgtaattagcagtcaggcaggaggaagatgccacctgcacttaaaactctgtaaggactgggaacccagaacctaacgcagcatttcacagaaaaaccgcaccttcagagttctgccaagggaacagattcagtgcaaggtcacacttcaaaatgaatgatctcaggccgcttcttattctgggaacctatgaatactcccagcaccagccccagggttgtcaggagtgtcactgtccccgcagtggctctgaaacatgtggtttctttctctctgctcttctcacatttactatcctctatctttttatttttgtccatgggccttccagttctcagacattaggcaatgtggggaagttccaaaccaactggcaggatgcttagtagaatatctaatacaaacgaggcaagttttcattctcctcaagttgacaaggcaaatggcatggtccatctcagggaaatctcaacccaactggcctaaaccactggctggctatctttttgacatgtggttatagtttggaggaaacttatctgagcttattaataaatagccattttttttgtgtgtggctcacgagtgtctgcttttctccaataagacttcaagcttcacaagggaaggagagacacaggcctgcatgagattcccagagccttagtttgtgttgcctgaagtgccctgcacagtcctgctcagtggcagcctccaggggcaacaaggaccacgtcagagatggtaacatctgacaggtagcagtggcactttcctagccaagcaaatgaaaagaatgcttgtctcatctcttccagagctgacactgaggagagtaaaaaagttttaaaagaacaaagggatgaagaagcacgaagcctaaagtggtgctaaacaaggtgatcgataattccctttaaaaccctcgagaccatctacgaaagcacctcgaatcaagtttcagttactcggtctgtggattcgctggctcctgacttcccctgcctttctccacaccggcttcttatcagatttcttgtcggtggcccactttcactaagagactgggaaggaggggacagatgaaacataattacgagtgtttgctctgcatcttgcatcaggcccacacatctgtggtctagagacacacctgtgctgcttaaagcaacagcctgattcctttctgtcctcctttctattcactcctgttgcatgtaggaaagaaatcccatgtaccagtctctaaagaatttacagtccattatggagaggagacacacacgcaggataaaggcttacatatgctaaggaaaatcaagatatatgtaaccacaagtcggatggcactaaaattaaggcctaaatatttcagagaggatttagggcagtggttctcagtcctgcctgcacgttaaaataccctcagttttttcttttttttcttttttaaaattccatgctcaggtcacaccccagaccaataaatccgaatctagtggagggactcaagcatcggtatctttacagcttcacaggggattccaatgtgaagccagaattgaatcccactgggtcttggtgatggaatgatagctggtaaaaaaaactttctatcaatgttgtaccatctttccaagaagaatacatcttaaattggaaaaaaatcaaagcaaaagtggtcagaatcaagccggttatgagggaaggaagacttgggctgtgtccagaagggattatgggggtagaagaaacatctgtccaaggcagttgtctgtaggacatgtggcaacactttggccagctacagccaagtgtgctgagggtgctgagtgggatggctgagttattgaatagatggtcatataagatagtttgtatttaaggaaaacttttgggtcaggtgcagtggcacacacctgtaatcctagtactttgggaggctgaggtgggcagatcgcttgaacccaggagttcaagaccagcctgggtaacatggtgaacccctgtctctataagaaatacagaaattagctgcatgtggtggcttatgcctgtagttccagctactcaggaggctgaggctagaggattgctcgagcctgggacgggaaggatgcagtgggctgtgctcacaccaatgcaatccaggcctgggcgacagagtgagaccaaaagggaaaacttctgtattatctgaatagagtaaaatttgactctggcctttagtatgaataaagagctggtagctacggctctgattatgggattatcactatagggtgggcacagggctggcatttccatgtgaaatggggaggtgaagattgagttggcactgattccaacttgcccatgaccttcggtggtcccttcctgggttggtcttcagcttgctccaaattaatgtgacagggttagacatgatctttcctgaagtcccttctagttcaacattctatgatgttctttgctggcttcagcaaagttatggggaagctgaacacatacaattcaaaagaagcactattaattaaaaccgtattaagaccactttaacagggagggaatgaatatgaatgtgatgagtctgtcacatgactatcctttcaatgagcggggaaactctttttggtggtttgggttaggatttacttgtgctgtttctgggaattaacttgattattaactgcccagtgaaacggccaaggaagactgcctgtcaggactgcatgcggaatgacgagctgcatatggcgcggaggccttagcaagcaaaagctgggtgtagccatatccctctgggcaaaggctggtgagttctaagaggagtttgtgtagtgtctacatctcagatttgctttggggcgaatgtgtaacataagtgcctccatctgcagttttaggagaagattttattggccaccaaaatgactcagtgacaccaggcagagtcttctggcaaaggttctgcaaacttaacataacgactgtgttgtagaagaaaagctacagaagtctttttcattaggtaagtggcaataataaccctttccacgagggcatccaagcaattgtgtgaaagatgaaagtttgcagttttgtgcagtagcaggaatggcagtggcatcctaagaccgactcagactaatctggtttaagctccaaatacgacctacattaaaagtggcagactctgatgaagcatagtgaggaattttctcccacttgttctaaatcctggagccttgacaatccagcctatcataaaggaggaagtatttctgaccatatcttggagaaatcaaatgctgtgtttatgcagggctaacaaataaacaaagacctgtgctccctctgctggctctctatagcaatattgaagcagaaaggaaccatacgtagtattggcatcttcagcaaacacaagtcagtttgggtattccgagaagaaccactcatttaacttggttttgaacattctttgagaaaaatctatcaacttctgacaaaggcacttggaaattcttaaaattagatattaaatgagacatacctgtagcccttggctaccagattgctagctgtgaccgtaatagtgatctggggattgattgatcaacagacacaagtggattcctccaaaatttttagatccagacacaatctttaaggcagttctgaaaaaaatctcaggtccaatgtaaagttcctttttttctcttttataagagcaacttctaaaaagcaaagatttacactatttatatcttttctgataatgtcaaacactagacttgattttccaaatcattagcatgcagaagaatgacctcatggtgaacagatgcacttggctgtgagctgcagtgattacatcagtccctcccagcagtcgagggtgcccattccagttaaccctttcaaggcctctctgccggtccctctttcttggtgatatgattgaaagcacaaatttagtcccccaccccaatatgtgtgtgtgtgtgagagagaaatgtatatgtgtatataaatgtatttatacataaaacatatatatgttaattgcaaccaatattttaatactggctacattttagattatttaatgctggtcaaaaaaggaaggtaaactatagtgctaggtaaaaaagtagttgaaatatctttacatgtcaggtgttatcaatacaagtaatggatggaatagatacaaggtagatacgatggtctttaaaaatattttctcattaggaaaatagattttgttttgaaagctctttgaaaaatgccgagcgctcatatattagcagctacaccaccatgtgtggttgacggcgcatcctgaacgcaagcctgttcacctggccaacccacccccgcagggcttgttgggcggatgggtaacagcacctggatggggagagtcagaagcagagggcattttccaacagtggaagcttcaggcacaggccattcccaccgagtgcatctcccacttttacttcagacttaaaggctgattttggggctttccctctagaagtgggggctgcatgctgctttctggcttgctgctaccaatacagtgcagaatgaatgcagtgttcaggtgatgctccctcttcattaataataaagtcctggtggtgaggatacaaagaaaacctaggagcccctaattcctcagattgtgcatacgcatgtgagcccaagcccaaggccctgctttgatgacactgagggccagagatggtctgattgggtcctaagtgcactgtgggagcttaagccgctcagggtcaatttttccagttggcttgttgcttggaagaacagacttcacctcaatttcttagtttaagctggctggctcatctgggtttgatcgcccttgtcccaagaacataacagtgtaaacaaatgacaaatgttttcatctgtagaagtagtaacagatagtggacagggattcctcaaaagcgaagccagtatgtaagctagaagatgcttccgaaaacgtgcttgtctatggtgctgaaatgctctgtcctcattgtactgccccacatttcagttcaaatcaagattatatctagttcattcctactcagcgttatgagaagatatgcaaagaattaaaacagaacattatgcctagacttaaaaatcacacttaaggataggcatgatagacgtataaaaatgtttcccactcaacactgaattccttaaaccatgaacactatgaaatgtaatactgatgttaataatttgaaaagcggagggagtagcatttgtcttgatattccatgtttggtttcacgttccttttagaagagttccaatgcccaccctcacatgctgtcagaatcttcattctgctaagcaattttcaaaaatatgacgttcttgaagaagcctattgacaatcctctccaagtagagttcttaaaaactcaaattgctcctagaatctcactcatttctattggtttaaataattatggatgtttggaaaagatcaaattagtttatacagaggctaaaatatacatagaaaacaaagtccatcattattcattttgataatatcttaataatcttaagaatgtaacagttaaggaatgaaaacatctagttattatttacgtgtttaattttaagaagtaaaaagctttctcaagagttaaacaaacaaacaaaaaacaaaaaacaacctgcactgaaaaatcaagtcctcacgaagaggggaataatctcatgagggtgggaaaaagctgaatgagatctttttaaaattagctttgctacagatccctcatgttctttcactgaaaaattagaaacgatttaaaatctctagccagaccgagtatgaaatcttcatttcccttgaaacgaatttgtttttgtcttagatagaatgttggcagagtgtataaaagaattcaattcacagctgttccacttttttaatgtaagaaacattaatcaaagctttaagttataagcttttctcatgttgcttagtattccagttcaacaaagatcaatagaggccatcccagtgttccttgacgcctcaccaggaagcagaggcgtgattatgcaaatcacgctgctcctgcacctctgccagcctgcttatctcccaagccttctgcctgctgctcctggctccctgcgcaagtgcgtgcctctccctcttatctcccaacaaagctctgagaggcaaggattgaggccagcgatgttaaacaatgatgcatggctgattttatttgtaagtgatttatttcactggatttaattttttttcactttgtgtataagatatttgttaacaagtcagaataggagaagtaaggcagtgttcagagacaattgacacaggttagaaatctattaagcactctaacagtttcatttaaagcagtggaagaagaaggaagctcctcactgagaatctcaacatgcattggctaaatatcccatttattctctgaaaggcaattaatctgtaattatatgcagaaatttacaagtaataattctattatttgaaagaaacacacagtaatcacataatctgtttaagtggcaatacatgtatttttccccccaaactggaaatataaaaagaataaaaacctaaaaacaaggaaatctatggaaactttcacaattttccactggccctaataaatgaaaattattgtaagctagtttctaaacgggttccacaccaggtgctgctccggtcggcggcttgtccacatgacacaaaccactccagagagacacgcacactgcactgctgtaatgatggaccccgggacactgtccttccatgtctcctgcattaatccctgaccttcgaatctcggcagcataatccccatttagcattagtagcaacggcttccactgtgaggaactcttttttgataagtaagcactgattcgggcatcgcttttaaacagcatattcccagctcagcaagaaacccacactcctgaatgaaccggagcacattactgagaaaaagttcattaaccttgctagatttgaaggttaacaggatagctgaagaaaggaactgagtgaacagctcgaatacaaaacaaattaaaatgaatgtcatcattccttttgatattcattagttgattcagagggagaatgctcttcttaaatttgcaaagcatttatctgtgaaaaacaggtgtacatctgctgctcgaatgcgtcttaagcgcgtgagagaagaataatgtagacactcacccgttccgctgagggagtagctgggagagggagaaaagacttgggctgcgaaatcctcgaatgtcattacttcgcggtggttctgaattattgcttcgagatacagagctcgctcttcatagctgcggtaatcggttaaggaaacaagtgcacgtgcaaagtggcatgcagagcagtgacagaattcacttttaataccgttgtgcaattttttctgtgtaaaaaagtatcctgcaggttctttaccatcttgcagaaaattaagtattagtcataattcatacccaaattctggttttgagacctaagtttctcttagactttaattgcattaaatactaataacactaaaaaacatgtaaagcaacagttacagaataacatcataagatcattagggtcgatttaaacaaaaacaggagatactgattgcaatagcatctctttccactgacagtggtagatcttttacatcctatttcagtggataaaacattcttagcctactgacatatgagttgatacttcaagcaacttggtgatacgacagtgcagacgcttcttaaaaataagaagatgcaagttactgggaagagagaaggctaggaagatagattctgagggggcatcagagcctctaaccaagacaagctgtgaacattggaaaataagaactactatgtgagagaatctaccaagagtgcacagtgcaatttaaaaaaaaaagactactgccttttaattaaaactgcagtctggaacacacagcattcaaatgtgtaatcaaaaaccagtcaccaataaaacttacaagcgtaacacactgaagcaactttccagctgtcttaataggacccctgcgtgtggcaggctttcacagggcagaaagcaaatcttccccttttgtgtgtggcttctgtttccttagaaggtgaatcatgcacttccaataacaggataacgtcagaacaatcccacaatggatggaggcactgcacatacgacgttatgaattaacacttggggaagtccgcatgacgtctcattttccccttcctcattatcaatgcaaaagttaaaagacatgtttcagtcgttttgaaaatcatgctaattctccgggaacacagggaatgcggatcaccatcagtttattattggcagctccagaagaggaaaagtaactctagcatttctcactacattttcaaactatcttttcaaaatggcctctttaaaaatacaagttggtgacaattatgtcctttcaatcagccttcaagacagcacgtgtttttaaatggtcaaatacttttctgctttcttatggcaaagtgtgcacaccgatctctaaatgcaggctcttcctctccctactccttcagttatattcagaggataattttcataccgtgaggagaccagaggcattctagggctgtgctatcccatacagtagccacaagccacacgtggatatctcattttaaatctgaattaattaaagtaaagagctaaaattcagttgctttgcccctccccccaccttgctatattttaagcactcaatagccgcacgtggctaggggttctatactggatcgcacagatacaggatgtgcctgtcaccgtggaaagcactactggacagcgtgctgccagaatttctccgtaagtttgttctatacaacctcaagcaaggaaaatgtgtttgaagatttccaaagtggcccctctaatgatttatgatcttttatatagatgggcacaaccgcccaaggcctgggcagcatgagcctgaactggcttcttgactgtgggctgaactcctggtgactcgccttaatgaacaggctgccaaacttcctcagcgagaggcgcctgctcaggcccaattctagagggacccactaatgccattcacgtctcattatgaacacacttattctgcacagcacttggctgtcgccacggctcggccctccgtgcatggccccagcaagccgctggtccggggaacagcaggacgttaggcctgagtggccgtctggcgaacaggcactctgacactaagctggcacgtgctggcccagcaggggctgagcgaggcgtgacaaattactcaaagagctgagctaaacttatggctgacaaccacctgagcctttggaccgccgtggcccgctgtcaacgctcaattcatggctccccctttcagtccatcgtctgcttgtgggcctgggttagagcaagcacgtccctctaaagacctgtcatgctctgcctagcatcgtcctgctgtttcctcaaaggccccactgcgtccaacacatccacatacagtgcttgggacaatggtgaacaaaaaggaaatgcgtgcgcattttgctaactactctgcggaagccacgtatctggaaagtggctggctatgttaatcaagctcatgatcaaacctacaaagggacgttttgcataataccagatgaactgaccccagacggcagcccaccgtcccaatcctggatggcactatcataagcttgttcttgtcataagcttgtccttgtcaaggctgagagatctgggcaccttagaggaagtccagcactatatttagaggagtaataatgaagttgtgagattctctgattcaatgaatatttatggtctgactcctaaattaaggcagtaggagacagaaaacataaaggtgcttccagaactggatcctggaggagcaagtgtttccttcatagaaggttcctgaccctgccatgcatgcccccgactgtcacacacagcccacactctcccgcccactaactggagtgttaacagtgctaaactgggtgctgtcatttagacaaacatccattagggattggggtgagaccaggagatcatcaaatacattttcgctcatggcccaagccagggcatgtaaacaccctgacaaagagaaaacaaatatccccttagctctggcagcgtttagaaacagccaaggagcttgtgggtgccaaaaatcatttcttttagtagccataaaaaacacagcgctgggatcttaactgaattaattgcaagggcaatttggagcagtatcatctgacattttcttatctaatatccttagggcttcaatgctggttgctttctataacaaagggcatttataatctagacatcaaaatgcttgtaagcttttcacatgtaagacatgttaaaatgttaagtgaatgctgaaataatgctgatccctggacggtcaaagacctttcactgaaagaggcaccaggtcaccaatccgatccctgtttcaatactagccatggcccttttgttcccttaaaaagtttactaacaaatgtgtaacttttaattctgttctgaattattatctcatgaaaagccacacacaacaaagtacttttttaaagagcagttttcccctggattactcaattcagggaacattcaaattactgaccagaaacccatcttggcttctggacatttctcagtttctttagccactcattctgttcacattttcacatatgaatttttatcaagaattttgattaagagacaggcctgtagtcccagtgactcaggaggctgaggtgggaggatcacttgagcccaagagtttgagtccagcctgggcaacatagcaagattctgtctctagaataaaaaataaaaaaatggataatattcctctactttactaaagaggttatacgcctttactggttacattttatcaaaaatttccaagagaacttctcgagactctcaagacacaccctgctgaatctgcagagctgtaagaatctgagaatctgaacctgtcccccaactttactctcattattgtttgttttaggttttagaaatgacagtagcagcatgacagtcaggaaggagcttgtattttggtggaaggaaggcagggtttgaatctcagctgcccttttccctgctaggtgttgatgtccccattttacatgtgagacagctgaggcaagtggttccgactccagcctcagttgtcctactaaatgtaaaatggggacaacaacgcctgttctcaggacggctgggaagattaaatagaatcctatatatgaagcatctacctgggttccagcacaaaaagaaaagcatgataaatctggattgactcctccctgcctctaccatgtgggcctagggttttgttgcagaaagaatgtagtaggtaagctggaggagagttctgtgtcaggctccatggcaagcaaaccccctttaggctacaccctcatgagcagggaagtcctgtggtctccattttactgatcaggtaatgagagctcagagagttcaagaaattttcttgaatcacagtcacacagtaatggaattaaggctacagcccaggtcctctaacctttactgctttcatctaatatcttgaattctagaataaatggtgttaagttcaagatcatgtgtgaggatgggaactaaactccaaatgagacaaatcaactgacttaaatatacgtgagctataataaccaacccgcaacgtaaacctgagtgcgtatgtgtaagctgcatctatacccagatcatgctgactttataaaatacaacaaaacaacaattattccattttaatttctttttactcattcgggctatgtgtttgttgactgttgtttagcactatcaagcttcttttatcaaagaaataaagagaactgtctgtaagaggctatgttgcagactgtattttttcaacccttgaaacccttcttgcctgaaccttctctaaatttcccaagagtggacatgacgctcagactggcaaagtggccccggacacaggcagcctcctgacatcagtgtgtgtgtgctgtaacagtttgcgtacccacctcagttttctttctgaactcatgcagcctctaatcactggcacaagcaagcccagagctagccattctcatgactctaactcccatggcagtgatctgcagaggagggaatgtcatgtttcagaaccacctgggacgcttcagccatccacgcatccctctcaaaagttctggcgcccccgagttctgctgccactgttccatcccttgagtacattagggtgtgtaaaaggttgaaaacctctggctaaatagctaccacgtatgaccatcttaagcctccttatgttagttttctgtggctgctggaaatgaccaccaactgggtggcttaaaacaacagaaatttattctctcactagttttgggaggccacaggtccaaaatcaagacgacagcagaggctgcaggagagattttgttcatgcttcttccagttccaggtggctgtctgcattcacggggctgcatgactctcctctttgcttccatggctacatggcctcttcctattctatgtgtctctcataaaggacactcctcactggatttactgctctcctggataacccagaatgatctcctcatttcaagatccttaacttatatcagcacacagccttgagtcaaatagttaacattcacaggttccaggaactgggacacagacatatggttttttgggaccatggtttacttcaataaactccttgaggacaccatatgagtcaggttcatcaaatttatgtcaagagaaatttattctcttacgtcactcatacaatctagcttaaaagcaccccacataatatttactgaatgaataaatgaaggcctgaaattcgtgtccattgctttaagctatgagacagctagatatattctaggcaatagcaacttgtaaggagaggttagagagttcaatttgaagtaaaattatacacagatttagaaaactgcgtgataaaaacttttagaggaatgtatgggggcaaactctttatgaccttggggtatggaaaatctcttaagaaaccaaaacatgaaccacagggagaagagactggtacatctgaccacattcaaagtaagagctcctgtttaccacaatactgtaaagaaggtagaactactaggcacaacgtgggaggaagcatctgcgactcagagctggcaaggggtaggtgccagaatataagaagaacgccgagcaaatccataagagaaagtcaaataacctactagaaagatgggcaaccaagagataaaccatgactggcaattaagttgctcagtaccattaatgatcagggattatgagaattacaacaaaataccatcttatatatcccagagtggccaaacacagaatatgtaataatgccaaatgtcagacaggacatgggtcacaggagccccaagaacctgctgctgggaggaactggcctggcttcttgggagagcaatctgaccttatccagggaagaacagacgtgcgtgcttgcaggctggcaattccgctcctcagtatatgagctctggtacatatgtgcttggttcagaatgattataacatgttacaggcaacagcaaaaaaggaaaaggaaactatttttaacattcatggataaatgcagtcacacaatgggatattatatagcagtgaaaataaatgaactataggcatgtgtattaataaggataaaactgaaaaccatgctcaaccaaaaaagccagtcaccgaaggacacattgagtgcaattctattgctatacattatttatttatttatttatagacagggtctcactgtgtcacctagtatggagtgcagtggagccatcatagcttactgccaccttgaagtcctggactcaagcaatcctcccacctcagcctcccaagtagctgggactacagacatgcgtcaccatgcctggctaatttttaaaatattttctagcaatgaggtctcgctatgttgcctaggctggtcttgaactcctggcctcaagtgatccttccacctcagcctcccagagtgctgggattacaggcctaagccaccttacctggcctatatatattttaaaaacaggttaagtgaaacatattgcttagggctacacacatatgtaggaaatgataaagagcaaggaaataataacctgggattacctctggggtgtggaggggttgtacctgggaggttctgaaatatattggctggtgcaagtgggtgtcagtaccgggacgtgttttagtgttccttagaacgtatgtaaatgacatgtcttctagtctatataaatatttcataataaaaatgggcaatttggccagaatgaaacagcactaatcaaatgaatcttttctcacccatcagaaggacagaatgagcttcaagtcgaaggttgatataaaaggtctatgtttgggtgttagagttgacgatgatcacaaagaagtccatttgactcagacacagagaaagcagaaaagagacagtactatttttagggatttcatttcagaaatagaccagaatgtcagagctcaaaattttcagaaagttgtggggaactctgacagaagggattcaaaaagctcaaatcaaacatggatacgaatgccacctgtaggggagggggataatgctccaaaaaataaaaatgtatttctacaaaattactgttgttagaattactatgcattaagaatgacaaaaccagctgaatctgagaatggtcagaatactacatatattcataggcttaagcatagatttctatacattatcctagtctgctcagagaactggatctcaagtggctgtgctattttcaaaaagcaaatccaccttcattcaagcgctcatccattcaagagatatgtattgagtgcccccctgtgctaggtaatgggcatgtaatcaaggaacaagatagatgtcgctcctgccaccagcaatcctgcattctagcagggaggcagaccgaacactagttaaaggacaagtccagggaataaggcaaactgtcattatgtcagtaccaggaaggaaagagggagataagctcaaagaagtctctgatgggagggaagcagctaaccaagcagggatgaagtggggtaaggagtgtaagagcagttcgggcacagagaatgccatgagcgggaaggaagttgggatacttcaggaggagaaaggagactggagtcatggggtagtaagagggtggcaggaggtgcagctgaaagacaagctgggcctgggcacaggaggcccgaatggcttgaggcaaggaagcaacatgatgtcacttaagttgctatattgcccttagaggaactgcaccactaaggagggtcctgagtgtcctctagtttggaagaggtcaaggctgactggcatctatacgttcaatcaatgggcttgtccaaatatttcaataccttacttattctttgcatttttcagaagtggatgacatacaacttttgggcatgtggaagaggtaagaatgctacttgcaggcttgaaatgaccagaacttctgagaatgaccttaagcataaccaggaaggactatggcatggcagagagagggccatgctgggtgacacacacaccctggcgtggagggaagaggaaatggagcagaagcaggctctccggtgaggcagagaatgaggcactacacacaaggaggcaggcacgaccctcccacaggacagatactgggctcacagatacttataaaaatgagatgagttaacagcagctgtggattgaggaatagtaccctgtttcgaatgtgtgaaatacacccacggatgcgttttaaacctagtaaaaaaaagaccctactgtggcagagtctgagctcagagaaggaatggctaagaatattttacaaaactaggaaattaattagctgatttcttctgctgctccccactactggccgcttttggtatagaggatgcacaagaaaataacacgttttcatttttgagcaatgttttgagtagtgatgaaagaaagtgaagaggcaacacacagaataggagaaaacatctgcaaaccatttaagtgataaggatcttgtatctcaaatatataaagaactctcacagatcaacaataaagacaaccaagtttaaaaatgggcaagggatggatgtgcatagacatttatccaaagaagatatgtaaatggccagtaaacacatgaaaagatgctcaacaccacaagtcattagggaaatggaaatgaaaactataataagatacgacctcacgtctactaggatgactataatcaaaaggacaagcgacagtaataaccagtgaggacgatgagaagatgtggagaaattggaatcctcataccttgctggtaggaatataaagtgtggccacaggccaggcgcagtggctcacgcctgtaatcccagcactttggaaggctgaggtgggcggatcacctgaggtcaggagttcgagaccagcctgaccaacgtggagaaaccctgtctctactaaaaatacaaaattagctgggtgtgatggtccatgcctgtaaccccagctactcgggaggctgaggcaggagaattgcttgaacccgggaggcggaggttgcagtgagccaagatcacaccattgcattccagcctgggcaacaagagcgaaactctgtctcaaaaataaacaaacaaacaaacaaacaaacaaagtgcagccactgtggaaaacagtttggcagttcctcaaaaagttaacatattatccagcaattctactcctagaagttcaatacccaagagaactgaaaatatatgttcacataaaaacttgccaacaaatgttcataggagcattattatttacagccaaaaaccagaaacaacccccttgcctgcaaactgatgaatggataaacaaaatgtaatataacatataataaaatattattcagccataaaaaggaatgaagtattgatacctgctgtgacacggatggactttgcaaacactatgctaagtgaaagaagtcagatgccaaagcccatatatcgtgggacttcattaatataaatgtccagaataagcaaattaatacagacagaaaggaaatcagtggctgcttggggccagaggcaggggagaatgtggcatgacagttaatgggcattcagtttctttttggggtgataaaaatgttgtggaattggaagtggcaatggttgcataactcagtgaatatacaaaaaaccattgtattatacattttaaaagggtgaacgctatggtctgtgaattatatctcaataaaataaatgcccccaggctgggtgcaatggctcacccctgtaatccccagcactttggagactaaggtgggaaaatcgcttggggccaggagtttgagactagcctgggcaacatagtgagaccctgtctctaatggcacgtgcctgtggttccagctggtcaggaggctgaggtgagaggatcgcttgagcctgggaagttgaggctgcagtgagttctgatcatggcattgcactccagtctgggcgacagaatgagaccctgtctcaaaaaaaaaatgccccccaaaatgcctagtggtacgcagtgcacactatgtactgtgaggaaggcctgctaataaaaagatcttcactgaacacatgagagaacaaatggcaggatggcctggcacagcaaaagccctccaggcagatagtggctgaatcatttaagcatggaagacacaggaagagcagaagaccatgtgccgcgactgttctagcagctggaggatgaaaaagacatagtcttgtccttcacagcattcacagcttatatggaaagacaagtggacaacgagctctaggaagctggtgggtggagcgattcatgggaatgaggagtgggtcttcgtcagactgcaatgggctggttacagaagggaagaagcaacaccagcctgtggcaacttggaatctccgaaggttttaaaacagatgaacagcaggacctgatctatgcctgagagataatggggcagggagacaatgcaggggaggaagcggcacaatgcagggcagacccagctggacttggggtgctcaccaatggtaagagatggagatggattctggacataaccctgggatcaaggtgtaagtgaccaggagggtgggacaaaaagggacctgaggaggagggcagggttgagtggaggagtctgaagagcccaagggattcctgggggacaacttcagggaagtgctgactgggactcagcagagaggcctggccagagctgaagagctgagtcatgggtttggagatgagcttgaaggagaaaaggggagaatgcaatgttagggaaccacccccacccccaccagagggtgggcagaagtgaaagaacagtcaagggatatggagggagcgggagacagccatttcccagatcctagggagaagcatctggaaggaggagcagcagggttcctgcagagcctcagctcccatgcacttccctggtacctgcctcaaaggcacatgctccacaggtgggctcaggtcgcatttaataactaaacaaatggataaaattccataatgagcaagacaggaacagatgccagttacatcctaaagccatacatcattttcacaagattttatctctctttcaatataatgtaaatttaaattctaggactgtttaaggccacaaataaatgaatcattgaaagtaaatgtcacagcctggtaacaggtaaagaggatgactttactcaacaatgtaaccaaataaaatggatgttttggaaaaggaaattaaacacatggaggtataagatattagattaagtttcaaaccctaatgatacactcctggagagaaacagtccactactgctcaaaaagaagaaaataccatataaccaagtttaagaataattctgaggaaatgataagagcaaatggaaatgagaaaaagattttcttcaggctattaaattacagacttttggagatggtctgttctcatattcctatgtccttccggcatagggagctgaaggtctccctcctagaatccgaggcgctccacacatgcaacggatttggactatgctgttattagaaatgttcaaatcagttcttcccaggggattgatttgtgaaggagcacatccttaattatagcattttccatttccatcttctccaattctcccagtgcacctcaccttctgcaaatcaccaagtgagaaaatgccccgtgacaccgtcgctcaaagtctcacatcagtaaaaatgtaagtgacaagaaaattcgtcattcagcctatttcaagtctagagaaagtgctgtcaaattgagtgagaaaagattcaacaggctacttcaatgatgaaaacgacagaaaaagtgacgaatcaatatgaacaatagaagccctgagttctgccatgctgacgccaataacttgatttctgggaggaagggagtcaatgtcacttgaaccgtgtttctctttcacagattttcactcgtcctaaagacatcatatgttagaagctaaaaaatgtactcccaaccttaatatagaaaggaccactgctgacatttttggggcatttaatatccatgaagtgacaacaaaacggaaaataattagaaatgcagaactgacctaatgttaaatgatgagttaatgggtgcagcacaccaacatggcacatatatacatatgtaactaatctgcacgttgtgcacatgtaccctaaaacttaaagtataattaaaaaaaaaaaagaagaaatgcagaactgcctctaaatgtcttaaatcctgtttgtggcaaagtataaaaagagtagacaattaaagagcaacacacatgaattgtaaactctgtttctatcatcactgactctaagagaaaaaaatattattaaataaaatacgttacaggtactatttagtgcaacataatttgaattgaattatccaatgtttactcttcgaccattctattttgaaggcaaaagcgactttcatttggcctacagaatagttcatatctaggttgattctagaaattaaataggatcatgatatatgatatacgatagataacaagtaaatgaaactgacaagtataagaaaacatctatagcagatactctggttatccattcctttgagacattcttaattgttacctataaacaatctcttaggcccacgtgaaatcagactaggctcaggcacgacacaactgaattttgtggtccaaagtatttgcaccaagttgtgtacagattttcttcgtttttcatttctgaaagcaattttggggaaataattccttttcatggtatttacaaaagtttagctttatttgttttttcttctgtgcgttttaaaataataaatatcactacctctggaagcagaaaatagtatttctatgcttctatgaaataattttaatagcttaaaggcatctcagttttccaggaagatattcatctgataccaagttatcagatgtcaagaagaaactccaagaaaagttaggggtttaccaaatgaaagtgacttacaaaatgaggaaagaagctgatgtgaaggttgccaagcggccttcctggccgattcagactgcttgagtggtacgctgggttgcaaagcacacctgagtgataaatattactgctgacccacacttgaaactcaatacaccccacagacctatcagagcaaaaaaaataatgccacaattattgaaacctcactggaaatttgggggaattctaataacacaaagctccctcatgatcagaagtagcaaaagtatgttggccagttaatattaaaagcaactgatttctggctattaataacagcatgtgatgcaactggctcacttaggaagaagctacactaagtggacacaagggttgagccatcacaacaaacggccctggagcatgtctttatctgcagcactctgaagagctgctccatctgtaggcatggctgggcccctcaacagacactggtcctgtgcaaaccagaatgaccagatgagcgtggagaatatgggtctcattaatgttatggaaagtagttttgagcagccacagggcaaaagcaactcttttactccttttacatctgttctaacatttggttcactgttaggttaaaaaaaataaagatgatcaggaagtatatataagtgacttacatagtgtggtttgaaatttttatgtttgctgtcaagattggtcatgaaaattcccaggggctgctggaatgacttactctggtttcataacaggctcaattgtactgttctacaccttctgctaatctggttctaggctgtgtaaagaaaaaaatatacacatatagctctgttgaaaataatgagtcttgatgaaggtctacgtgtttgagtggggtagtgaagccacctgtttgctaacgagtctctggctgaagggcactgggctgagaaccccacaaggtggtcatacagccctgtgatgcttctgcttaggggtgaggaagggaaacactgtaatgatcttagaggaaggcttaagaagcaacagggctcaagtgtgaagttcaggcatcgtcactgacataatctcagagatcatcagcaacacacagcatacgggatgcccttttacgaatgcacctcaaaggaaaaagtccctgttctgacagcccttcaggtgtggcgtctgcagcaggtgaatcagactacatcctgagcataagtgagcccccggccaggcacctctgctgatgctgcatcaaccaaagattacatttaaataaagatgccaatgaaaatgatcaagtgcttttaatgggttgaagttttataggctctatctcatttaatcctcacaacttccttctgtggtttgtactatcctaatttttttgtagaggaggaaattgaagagcagtgaggaaaagtgttctgttccacctctctcagatgctaccagcagcctgacttgagagcctggctctcagtcacggccctgcctcttatgatcagaattctcccaacaagagaaaagactagtgaggccaaaactagcagaagacccagttccatctactcactgctgttttcatagaaagctgaaggagtaaattgtagcccttcttccactctctccagttgggactctattatccaacaacttcaggtgaaagaaaacttactgtgttttctcctgcaaattaaacttcaatacttgcatttcaagtatttttggctcttacaagccagtgagagaaatccctgtgggttagagcagaggcgggagtgacagtttcactaaatcccatctgtgtgccattctgcttgcggggtgggagcgtctgcagcacagcacatcagccctgcgtcctgcacttattcatgcagatgtctcttcccctgtcactcatcccttcattagaactccctccgaccggctagcccaggggctgctgtcttcctgcccctggtcctggtgccccgtttcaagtggtggtgtacagcactgggtgccttgtgtgtccttcatgtcctccagtgctcctgggcaccgttaccatgcacctgctgcagtggcccctcggcttgcaatttgacgtgaggcactgtcataccagtgaccgcacaggttgccagtaacaggaaagcaattttctattgagctatgactatatctggcccaggatggattgtgcaagggaaaaaagattttttttttttgtaaggggtgttttcttttgtagctggacaacatatatcatcaagtgcagagcagatacttggtccttcctgaatctgacatttgaacaacagattcaacatttctactccatttcagcaggtacctctgagtacctaaatcttttcaacttttaagagtaaggcagaaggaattcaggttaaaaagtctgctgcagtcagaagagagatcagaattagaaattctctcataataacacatgctttaaaaataaaatttcagaaaaaaatgatgggtgtttatcttaactttttatgtctttatattctgggataattctactttactcttcaatgaaaactgtctgcttttatattttatatgcaaaattccttgtaacagatcccatctattctgcctaaactcataaaatatacaaataacagaaacagcccccagtgctgttaaagataaaattcccaacccacacaattctctgggactttccacatttaagcctcatagagtcacttgatatcatcttcgtgactaaaaatataactgcagtattacttaaaattataatcaaatcattctcttgcaaattaagacacttactcttagaaaaaaaaatagccaaattgaattcggtacgtcttttcttgatagatcaaaagcagctccattaaatcagcagttttatattaatggcatgagacatgacccagatgaggaaaatgtcctttggagccattttgtattttatttgaagagccatggagatgatcctcacaattcatatgtgaggcagaattgtatcactggtctcaaggccaggaggctggacatgatcccaaatgtggtggcccatccacatcagagagcccaggttcatcttctctcaatccctcatttcttcccattattgtgcctgccacccatctattcacccacccacccatccatccatccatccatccacccacccacccacccattcacccatctactcaccaacccttccatctgatatttactaagtgcctcctacatatccattattctctcctcagatgtaaggaaagtacttccttgcatctcagccctcctctaaatctttgatcctataatattcaaatgttgtactgagtattatagtatattggaggattctaaaacccatcatagtgagattacactataattagcctgagttctgttggggcaacatctcacttagaataaaagagacaatctctatgaaataaaaacaagctacccaatgttggtgcagttggctgccactcatgaagctctttgtagccaagagcccattgggtcctcctgcaaaactcaaaccacatatgataaagcagagacaggcaacaaaagtgatgctctgagaccacccagctagcaatgagcagggctgaaactcaaacccagggcgatctgttacacatgctggcctcttcctactcccttatgctgtctcagtttaatctttcaaacttatttaagatgcttgcaatgttcagtgctaaattaatccacaaacattgttgtttggtgctaacaggaagaataaggatagataaattagattcttctttctccccccagaaccaagagtagcacaaaactggccatttttatagctaatctggaataaatggtgactttctagctaaatcattatctgtacaattgtcataagaagctacaatttagaggaataaactacattaatttgattctttccttcatgcagcaagatttgaaaaatttacatgacctcatttacacaaaaaattatctttctgcaattatttccagtgatattttgaagacaatcagtacaaaattctaaagttttcttaattattttgaatggacattttcaaagagagaatgaatttggtgccagatgtggcttctgaagtcgtgacatgcttcaacactggagagcagagcgtctcacggtaaaggccttttgcaccataatcaaaacactgagaggaacaggaatgaactgtcattctttcattgctatcttccaagggggtgaaccatttctgataaatccttatttttaattatgtgccacttggtgtcattcaaaaaccctgaagagggtagaagcacctgtgcaatgactctgaacaaaaaagaaggtagaaattcaggcctgatatttcatgtgtcatcacagatagcagggttgaagtcaaagccctgagttcagatgcagactcctctgagtcctggccctgtgacctcaggcaactagtttgccctgcagaacctgcatcccctcatctgtgaaagaggggttcagggctgatctgcaggaccatgctgcagtgaggggaatgatgccacaggtgtgcctgttcaagatcacagcagcagctgctggacctagtggcacccggtcagtggaacctaacagggagcagctggcaaaacagcaacgtggagtagagccctggcattccagagtagggacacaagggcaggcctggatctcagtgccactcaatcactgactaccgtggccaggcatctggctcaaagttgtgggccctgtggaggcctagggcagcaagatctttccctttatgggaaagggccacatcacctccttgtcccatggcctgaatgcttcctccaacaggtgggggaatatttcatgagaagtgtttttctcaattaaaaacagaaacacagggaccagtgataaggagagtagtcattgtacatgatggaaacttgcctctacctatagcaggttctgatcctgatcaagtatactggtgatttactttgtagactgatgtttcaactgttttcactcatctccagtgaatattaaaaatgtcacttgagaaatttcctttgtatttctctactgcctttacctttcggagttccctgtgtctgtatgttgatagcagacacaagatctcactgttttcatgaaacatcacgtatgtacatcactgggatcacctggtctcagtatatactctacgtagaccccaaaggttaaggacagtacatgagcgagagaactttttaaatgcctctatatattttcaatcagaagtaattattttgtgagttcatggaggacataaagacgttaactcatggtccctatcgtctcccagcatactactgatatgacaggaatgactttgggacactcttcccagggcttcttggtggtgtgaacaaatgtgcaaggcatcatgagaaggaaatggctatacccttttggtgtggttgggggctttgtggagcgagtccccctgaagcgtagctctgagactgagtggaatctacacaggccagaacaggagtgatgggggaggcaggaggaaaacatcatggggcatttcccaagaagccatgcccagagaactggggaacacagggctccttaagaagtaggactggagagaggccggagtctagactgacactgctgttagggaagcgaggaggctcctgagggtagacagcaggctgacaatgcatggtggtgagtctggcagccaggtatgaggctggaggggggagaaggaagggtgccacagcacagagatctgtacagaaagccctggacacagccttggaaagtggctctgggcagagggagaggatcccaggcaggtagaggacatttcaaagaccagacaggtttaatggatgatgcaagagaaaaccaaaacttaaacatgcaccaggctttatataattttaaaatgtatgacacaatttgcaaactggcaataaattactctaaaattatccttgagatgggaggatggccatatgcaaaaaaattaagcatggtgactgtaggtaataatgtattatagatttcaaaattgcaaagggagcagattttaagtgttctcaccacaaataaatgtaagtatgtgaagtaatagttgattagcctgatctaatcaacctgcaatgtatacatgtatcacaacatcacactgtaccccataaatatatgcaattattatctgatggttccaaatgtcacttctatagcatgtgtgcacctctctatgcagccataatgtctacaagaggcctgtgtcccgggtttttcctctatgcaaagttgaagtaggggctatcttcaatgagaaacatccactaatattacttgcacagacttaatgggagagataaatgggttatacatcagttaacttgtaactaataataaattatattttggtcattaaagtcatgtaattttttaaagaagcagttggtgcgagaaacagtaaggactgtgaaataggaaccaccgttgttccaaggctggtgatcgtcttcactgtcagaattcatgagaggaagctatgtttattttcccttgatgacccgaccactatggaataaaacacgtaggtacattttctacagagacggatccaagactgtgactgtctcattgtgcctgtagtggagggctgccagggctctcctttgctggttataaggagctgccttgtgtcacaaaccaggtgattaccatgggttaaacaactaagggcagggtggagagtgaccaagcagtggctccctgagctcgtgacggtgctaaccttttcaaaggtgagcgccgtatatattcatttcagcaagtcacttaatgagcttttggattttttcagcacaaattaaaggcacctacctggatttttaaatcacttggtaatgccacctaatccccctgagtggaagaaaattaaaaacaagagccacagcatttccttagaacatcttgatgtaaagttaatgattctttgagagagactaaatagcagactatttcaatattcggaaacactggaaaatacattccaccatgctatacatacatgggaaaacaaaaaactatttatttatttagaatgattttgaaaaaaaaaatgaattctaatctctccaaatagcctcatttctgaatattttttaaaactagcccgcttcctctttttaccagggagaatcatcattatcattaaatactccaactctgcaattgtccaccctcaagctgtccatgtgaaagtgactggttgatctgactgcccagcagcacttggtgcatgggcagagcctccgctccagctgtctggaggtgcacatctggctcactcgtgagcaccaagaatctcctaagtgaattctccccattctaaagagcctgcattttaagaatgactatgcaaatttagtggcaagccattgggtcatttcatgtgatgccaacaaacatctagtaacacttctatccatttgtctctccattcagacataattatcagtcctactatgtgccagtcaattgtgtgcccaaattatcttgaataattctcacaaaatcctatgaagaaagtattgttactctcactttatagctgaagaaattaaggctccgagttcaagattaggtgataggcaaaccaatattagcaatttcatatggttccacctagtaatttaaccagagcccaaaaaggtggttgggcagggaggggcttctcatacaatatcttaaaagaggtgagagaaagaaactaggaggagcactcaaaccctgcaaggggctgaggggatttggagaagctgcagccaggcacaggatatctccagaggctgctagcctgtgagaaaacaggaataagctctttgatgtaaggtatcaatacaaatgcaacctaaaaacgcagtacttttctgtgcaagctgcaccaacagtttgacttatctcatgaggctgaaatgtttctcagatgaggtccaacaagtataagtactccccaaacaaacctactcagctcatttaaaataagcccttacttaaaaaggaccacaaagacctttgaccaaaggaccacagagacaaggtcagctgataaatgagatagtctggatgtttttgtgagatgaagacgatgctcacgaaggaccaggattagcatctctgcttcaccacacaacagacaagtgctaaaatacttcaaaatccagtatacatcagtgaaattccgaaatttatcagaacagaaagtagatcaaataacaaaatactgcatgatatgtattttatatagtaaagtatacttaacagccatgtagatgaaggttttggccatgttctttgtactcagacatggcatgcagttgtaagctctctgtagtagggaggaagagggagaaggggtggtgatgtactgggaagtccatgacttgttcatctgggggcctgaaaaagcccctgaaaaatcaaagctctagtaatttagcaaggtccagcagtgaggaataaagtgtataaaagcaaaatgaagacaaaaataaaacaaattttaatacacatggttagtctctcccaaacaaaagttgctcatagccacacacactggcctctcatgggaactcatgggaaatgccagtagttcctctgtgggggtcccgggaaaagtgcagagctaaaatccacagtcagcaacgaggccttggattttaaaattaataagttcaaagcctgatgagatggaaaaggttgtaaaaagcaccttaaaagcaagcagaaacactctcagtcccctgtgagctgtgcaggggactgtttcagccacaaccagaaatggatgcaggtgagcctctgatatcctaacactaaaaacagacggaggccaccagcatggccaaatgctcagaagtgaagaccaggaggagatgaccacgttctgcatgggatgtgtttgttttaaagcagtctgccattgcctttcatctgtttgggtagaggactatattaaaattcctcttagaggctgggagcagtggctcatgcatgtaatcccagcactttaggaagctgatgcaggagtatattttgaacccaggagtttgaggccagtctggacaacgtgatgagaccccgtctctactaacacattaaaaactagatgggtgtgatggtgcatgtctgtagtcttggttacttgggaggatgaggctggaggatcgcttgagcctgggaggtcaaggctgcagtgaactgtgattgcaccactgcactctagcgtgggcaacacagtgagaccatgtctcaaaaaagttttcttttagagaaaggcattcaaagtgaacttatgaaaaacaaatctacaagttattctcctgtgtcctaccccatgcccagaagctgacgggacatcacagagagatggctccaatgtggactctgttcttcacctacgattcttgaatgccatgtttgccaatgcttgaggtgcaaggtatctaaaagtggtggatactgcagacccttttcctcaaggaggccctgcacagccacctgggtgttgatgccagatcccctggctctaaactcagccctggatgaagaaaatggtcatgggaggcatgggagggacaggcgaatgctgcaacaatatggaactaaagtccatgacgcagaggcagaagcaacacttcagagatggagggtgttcaccaccctgggcagacagcgcgtactctgctagatgctgggagcagctgaggaaaaggatgcataacagcatctacagttaagggcactgtcatttgggggagaaaaatttacataaatgcagctaatacagagcaaaaaaggaaggacagtaaagaatgaactcttgaataaagtgtacggaatcatattatatctgaaggagaagagtagggaacaggggtcacacccttactagaatgttggctgctgcagagctgacaatgctgtgccatagcaaagtgggaggagcatgtgcgtctctccacttgggggcaggataaagatgtggcacagtgtgatttttagcaaagaaggaggcaggctgatgctgccccggagtcccagtgtggtgaaaagaggtggctctgttctcttcacgaagggaacgagggaccccgacactgggatgtgtctgtggacactgccacaggcaggaactgcactagatctatggcctttcagggactgctctggattgagctcacatggacaagaatcaagattagtctgtgagcaggattagtaaaaattcttagaaatttattgttctaagttctgtttaaatgaacaatcccataaatactgtagctgctcaagtcttgaaatggggtgagttatgtatcaagttgaatcatacaaaattgctgatttttaacctgcaaaagcagcatttcatatggtctaaccctaataccagacagtaacagattacttggaaaagcccgctgggccccagacatttccccgtctgtctgcctaaatcacagacctgcctgtggacattgctccctctctctcaggccactttgctcctcaggaaatacagcagcctccagcatacagtgcttccaggacccttcaaataaaaccccacgaagaaaccagagctactgaaatccttagtacttccatgttccaagtaaatcagatcaagttctctacacatgtgctttgcatgagttttctaaaaagatttcagtctatttaaataccatccctaccagataaaacaatttaatagggtagatctttctttgctcaaacacgttacttatctattccttcttccaatgccatccctaatatgaagaaaaaactggtagtggttgataaagtgtatttaagcgtcacggcaatacatgagtaagacggcaaagtgtccctgccatcagccggtcctgggccctggccaggacacaaaggcatagaacaccagcccagggaagccatctcacttcccctggggagacaaacactggatggctcacgaaggcttcaatgtgttgacactgtcgtctctgctgccataaggttggaggccgaagagtaatctaaatagaaaaaagaataaaaccctggcctagtcgggtgagtagcgttctgggagaggcaatgcgtcaagccccaggctcctggaagggagggaggcaggaaactgccattttgactgcccactacgtcctgccagacacactcatgtgccatgcctgatctaatccctgccacgggcgggcggccagggcgccacctcatccgagcctgtgcattggccatcatggcagccgcaccggggagaccaagctccggggctaactaactgacgggaggctccgagctctgaatgctgccggtgggaccttggcaaggtccccatcctccctgggtcctgtggcctcctctgcacaatggcatctgaacacaaaccatctgttcacatgggaatacataatatgtataatttcataaatgttagctcaataaatgttggcattattaattcaaacagaagttcacctcctgtaaatggggaaattaaggagactggcaaccacaaaccactctgaacgtcctgaagaccgcctggtcactgaggcacacatgactctgcaccctctgacatgccacgtctcatctggccacaaatccccatcaatccagaacctgaccacttgtcaccaccacacgccaccatccaggccacgccattgtcatttcgttcctggattatggctgtggcctcctacctcttctggcctctgtacccagcagcaggaggctttcagggatggtgccgtcctccgttcagccttcagatggctcccacctcacaggaaaagcggaagtccttactgtggctggcaaggccctgccccactgggtgcctgcccctgctgtcacctctgtggtgtggagcccttcccacacttcacacacacgatgtgtgtgtgctgtgccctctgcctgggatgctcttccaagacccctgtctggctgcctccctcacctccttcaggtctttgctcaaatgccagcttttctcaggaggcactgtgatccagacccttcattctccttttcttggcttcatttttctcctcagtactcaccatgctctaacttccctggattttcatgatctagcttgcttgctgtcagcctcttccactggaatggaagttccatgcgggcaggaactgtggtatatctagcacccagagaacaggccccatacctacagagtctcagaaaccactctcgcaggctagctggctgaaggaacaacactgcagtggttccagtggatcctgactccgtggttcttatgaatcccgcaaagagtggttcttaatatgggtcaatggaccccatggggatcttctgggtgatgatcaaaattccaggggtccctgaacttggatggtaaaaaagcacatcttcattctcactatcctatcctctagctgaaatgaaacatttctttccgttataaataggaacataccacagtgatactacctgtgactgtgtcaccagtagaaatcagatattttcatgacgcattatattgttaccagtgtctcaaaatattgattctgctcattactgcttcaaaattataatgattattggacctactactagagcttggtatttaatgcatgaataaaggcattcctatattactatatatgcatttgctttagaaagcatttcactataactgatgtactctggaatcctatatgctttatgttctgcatttacaaacattctgagaagtgcaagacatccatggcacaaagaaggttgagagattgcctttgggactgactccctttatcccttttagtgtccctgctaagttccagggtatgttcacggtacagccctcagaggcagtgatcagggtgactcagccaccagggaccacaggcagcatgggcccggggctgccaggcagtgcgctcgggactgcacgcacgccaactgtccaatctgggtttctagctccagatccaaagacagggtcaagctggggttgccaggaagactctcacatttgactgaaaacaaaatggagtttcaagctatcagactaaaagacggactaattatttatatatatgtatttccccccaaacaactaaattcatatatatttacttcatccttacagagtacttatttatgcaaaatggaggctgagaaataaatcctttagaaaaaaaggcgtaaaattgtgttgttcttctgacttcttgtttctcctgagcaaactttgggtcacctttcattgggaaaggcccaatgtgcaaaaggggaagaaaagcacattcattaggccactgtctctagcaggccctgtactaattacttttcgtgtaggatttatttaccatctcttttcccaggcatggaaacggagactaggagacgtgacctggcttggctcaagtcactctcccaatttattactaagtgccctgactgccatctgataatacacagagatgccacagacctaatattcatccttctaagcagtcctggttttagtttttttttttttgagacagggtctcactttttcacccaggctggggtgcagtggtgtgatctcaactcactgcagccgtgacctcctaggctcaagcgatcctcccacctcagcctcccaagtagctgggactacaggcgcacaccaccatgcccagctaacttctgtatttcttgtagagatggggtttcatcatgttgcccaggctggtctcgaactccagagcttaagcgatccactggcctcagcctccccaagtgatgggattataggtgtgagcgaccacacccagcccctggtcactttttacagttaggtatcactagagagactaaatacccaacaggaaacatttttctcatttctattttcccatgatagataccgatcctgggggagtgggctggggagggtgatgggattatccagtgaaaagccgcaggcaacagttcaagtccctctgaatccacagctacatgcacagcttcagagcaatacaaaacaggtaatttaattccataaaattatctttctacagttcgttttttcctcctagcctactgaaatgtacacaccatgagtacaaagtacaaggtgctgttcagctgtaattttacttctgcacatatttaatgtgctaatgggatgaagcatttcatggttcctgtgcttagcaaatgaaataaatcaatgtgttaagagaaagcgattttgttcttgctgtttggggaaagtgctctttactttcctattaacaaaaacttaatgaaccatttcacattcaaaaccccttaggtcataatgtctatttcttaattaagtttttacaagtcaaataatgctaattttcttttatatctccacacgggcagcagcacttaaaaaaaattactgagaataaacaacaccacagagtgaggactatttcagtgagttaaatatagatgcttgtagggctttataaaggaagatagagaaagcaaaatgacctggcccagaatacatgaagtataatcaaagaaacagggtatttgggttactatggaattcgggccaaaataaagttttttgtatggtgacgacttggaattttgcttcaaaacaggaagcataataatgctgacctgctctaagaaacagtggtcactgagtatttaagttctttttcttgaatttattttaaatttttatgcttaaacttcccagcctgtattaaataggcctaggctttgtacaatacagaaacaggtacttgaggctcactgctggttcgttcttgggccagtcttattttctttcatcctaattgcgcagacagcatcggagctttgtcagctttacctgctctgaatagaagcacttttggccccccttgtcaaagactagggaagaaagcccgcgctctggttggcagcagtcttggattctcgcccccggccatactgtgcaatcacgctgtttattccactgtaacaatcagacagcgagagcagagcacctggtactccccggcccgggccttccttggcagctgacgggcaacctcactgccaggtggtcgcgcttcaattacattagctagccattctagggttaacgaggacccactttcttcagaatgccccgggaaaatcagttattcataaaagacagtatgccttttgttgatcattgaacaatgttgctgaaaatccattaaattaaattctctttattgggctgaataatgcaatagcaatagccccagctagaagtttgcatgtttatttaccaaatttctgaataatttatacatggatcctggctcttttatcagttagtggccaaatgcttcttcggaatggagcagtgtagctctgccttcatcttaacatgcaccaacacttgcaaataaaaaacaaacaaaagccgaatttaatggagtggtcagaaagggaaatctcattttaattcagaattcacattccaattttcttttgcaagaggactctcacatattttggcatgaatttacataagatgctttttgggagctgtttcacatgaggacctttttcataacagaaaatgaaagagaaggaaacaagtgggaagtgggacagccgttaatctgtaagttagggaactgctgccaatgtttaggtggaaggtgaccgggatgaggtgagtgtgggtggacctgtggctagccttgttgaaacaaacaaacagctagaatgtcaccttgccctccctgggcctctgcagcagtgaccacaatgacagcagaggcaggtcaaggcaggacagcagcagaagcaagctccctcccttcagtcgtcagtcatcctctgcttctctccctcaagaccagcgggggttgctggaggagcactccctctctcctcctggctaatgctctaggttgcccatggttggagcactggccatcagcctcagatacagagctgtagagttgacatgtgctgggaaagctttaagtggaagaaatgtaagaaaaacaaagttacagaggtatcctagagtcatttaaatactgctgtcctagggatgtagtctgagctgttttggagatcattttaaaacaggatttttctttttttaatttagaggcagcatcaacagaaagtgaaattatcctgaagtatacattatttatcacaaataacataagacaagccaagaaagaaattctattggatttcactttcatttaagaaaaaaaatttactgtttttcagaaatgaaaaagagtatctgaataaatttagagaaaaaggcataaatattagttggtttgcacattcaaagtagtctgtgaaaatatttttagcaattagtgacaatgcagttggaagacagacagcagtggctaagagagtgagcaccaagccggggtgtgaattcacttctcacttgatggctgagagatcttgggcaagtcattcagcttctctctgtgctttcgcttctttcttgcaaaatgggacaacaaccctactttctagtgatggtaaagtacacataaaatatttatcacatcgtacacattgtaagagctcactaaattatgacttatagattggccaagagatacttggtgggaatgttctacactttcagatgccatgaggcatcttcactccgctctctgtcgtcttagcctaattcaagttatggccatacactcagctactctgagtcccttaatgtaaccatctcattcgtttcctttgcagtggaatagcacaaacaaattaaaactcaaagcaagcaccaaagaataactgtgttatattgctaatgaaatatctaaagcatggattgtaatcagacatccaaatataaatgttttagttttgctccctgatcatttctgataaacactttggctttgccttggcatttatcttcctaaagcagactggtattacaatgtacggttccagtaacattatctctgaattataagatccaccttgaacaaggctccagcacaaaggtattagaatgtgctgatgacaagcagacactcttctactgctgaaaaacaatggctgacacttctgtacgaacagacagaaggcacatcaaaggaagccttttacagagaaaaattgtgtgatgcccactttaatctctctagaaatctatgcacgaactgaacccaatttcatttttcacataaatgctaaggcttgatacaaggacatctttttctttacagttaaaagatgaagagacaaaagatacgctagcatagcctttgaactttttaaagctctatcaatggaccatgatacttaaccactgatacaagggcagagattttacaatagctgcatttaaagcattctgactaaaaccagtcattattatagattaaagaaaggcattaatatccacgttttccttaaagctgcatagtttttatacttttaaccctttgatcaattaacaaaggtctaaaaaggtaagattgtaataccagaaggatctgtaaaactaccgtggcgtggggatgtaatttgaaggggactgcattcatttcctggatgaggaaggatgcataaaaagcatctttttgggtgagaatgcgggaagcagtcctccagtgaatgaatggcttcaaactgagatagtccagatagtgactcttctgacattgcatcattttctgggggcatgggagaactatgaaacgatgtctccaggtgcctcttgatcttcacctttttccccttgtatctctggatccctcttgagccttggctgtcccataccaggtgcccctaaatgtgaagctggtgctatttgtcttttatagttgcagccacctcaatcttccagcatccctaacttctttctgcctgtcaggctgctgtgcaaggcgtaccacatgacatcctcataaggtggagtccagctttgtggtcagaatgcctgtgcgccaggcccaccataaccattataaagtgcttgaggaagtcatgtgactcctctgggcctgtttccgcatggctaaatgatgaacacagtggtgcccacatgaagtgcttagtacagtgcacaacaaaagctaagtcctggatagctgttagccactattctcccctctcagatctggaagaaaccatgggggaatctcgagtccatctctcacagcagcagcaatcctttcttcctagtccttgggcatctgtgaatccctgctaaggggctgcttaatgccttagggcagcagctcccattcctggctgcgcatgagaatcacctagtggttaatcggcactgatgcctggcccccattccaaaccaagttacccagaatctgtggggtgggtgctgggcatcagtcaatattggaacccccatgtgattatatgtgcagccagggttgggaaccatggtttatggcaacacaacacacacacacttcctctggaatcctcccctctgtacagggccacagaatgggacagaaggacctccaggggcctgtaagcaagaaatgtgtcagatacgtgttaaaaaggaatgcaaattcacggcttgcatttattttaatacaaaaatgttgtatatgattaactatcaagtactgctgatgatctgcaaaggcacgctgtgtgtctcctgggactctcctacaccctagcacatcacctcgtttcccaatttgaggagatcttacttatttcaagaaattttaaaactttttattgacaaatacacacacgcacagacacacacacacagtacacagaagtataaagctcaatgaattttcacaaattaaacacactcatgttatcagcaccccaataaaaaatcaccagcaccttcctgctgctttccagacactctcccccttactggaaggataactcctctcctgatacactgcagattagcctagcaaatactgtcagtttccccaagtggttgattgagccaatttacattcccaccagcagcatttcagagttctagttgttctatagtctcaccaacacttggtatttttcacattaattttaatacagtagccagtccccccttctccgtgacttccttttccataagtttgttacctgcagtcaagcaaggtctgaaaatattaaatggaagattccagaagtaattcgtgttttaaactgcacactgtctgtccttttgtccagcgggtccacgccgcatgcgctgcctattagtcacttatcagatcaacagccacaggatcacctgtgttctgtgttgcatgtgcctgtgttcgagtaactcttattttactcaataatgtccccaaagtgcaaaagtagtgacgctggcatattgtcataattgttacattttattattagttattattaatctctttgtctaatttagaaggaaacttcataataggtatgtatgtgtaggaaaaacgtagaatataaaggttttggtactatctgaggtttcaggcatccactgggcatcttggaatgtatcccctgtagataaggggaagctactgtaacttgagatgctcgaatgtaatgtctgactattccataagtgcctgagttttgcaaggagattcatgaagatggaagcctattacacccaaagtgctgaattttgcatggcagaaaggcagatgatggagtaaatatattggtcagatgttggttctgagtatgggggccactgaatgacatttactctgttcttggaactggaagctggggagatcccccacggaatctaatctggcctttggctccaactgtggccctgactagtccacatcactcagaaatgggtgcttcttcaaattcttgtttttgaaataaaccataacaaaaaaaggccaatcaacccacccacccaattaggctattttctccatggctggggatgggtaaagggatctatagcatagcctccaaacagtactttcctctcaatgccaaaaaacttctgattaatggtcaaacaggttcttaggaattacacttccatgtaattttcattataaataaatttaattgcccaatgtgtttaatatttttagaactagtatgtaaagaagtataatcttaaaaagaaaaactggcaaaatccagcaactgctttgaaagaagctgtaagatttgaactcaaaagcattttctgaaaagctggactcagagccaaagctaatgcattctgctagcactaaacaatgcacatttgctttggaaaaaacatttttttttttaatgactgaatttacaaacatagtccattttcttcttagagctaaagtatcatctctcttgctggggcactttttttttttctttttctttcaaaatcctctttaacaggagctgtggttagtaaaatcttatattcttacttgagcatatgttcttcatagaaacccaaactgtgacctctttggattgctgaatgaatgtatatgtttctagttagtaagtgtgaactgttaaaactcacataaaacacaaaaatttgagatatccccctctcaacttccccattttgagggtttcacataaaaacaagtgaaaaacatttagagaaatgaaaaaacattctgaatatattataaattggttaaacacatatgctggcagattatcaatcttttgttttgaaaaccaccacatcatcttacagtgaaagaggtaaattttcaaactattctgctgccattacttttaaaggcaaaaaccgcaattacttttgcaccaatctaaataggttttgaaatcaacaaggaggagaggagaatgatgattaagaggagaacagcagccaccagaagcaaaagaaatgacagtaccttggctttgcaggattgctgtggaaagcaaatgcattactacgcataaagagatgaatgacactgcactgctcagcactgccctgggttatacaaagctgacctgcgtggctacaggtataatgcagagggcaaatattccactgggcctggtggttctacataaatgataaagtgagtgacttcctgggttgaactagttcctgcagattcaaaatgtgtctgaggctgtgacagggtgaggacactgcaggcattctctggagtgacaagtcaccgagcctctttggctggctgtgcccaaactcgcacttaggaaatgttctaaggccaaattccactctggaactctcaggctgccatagttctgctaagttttagtttgatggcccatttgtcatgaagtcaaaccccagttaaactgatttctcagctgattggcagggatagcattttaattatcttgcttgtagatttcaacattttaatacaattgcatataaagcaaagataacttttttccatttgtgcttttcatttcattaagataaaagtggtttgagtctctttttcaatgggttgataaaggaagggggctatccattgtccagcaccagaaggaggtcagctgtctgacttggtggcagtattgagaatttgctaacatggcaagcaattcgaaagtttcccaggcaaagatgcatttcatttgttaattgatttttaaagactttatcatgaaaacaggattggagacactgcatacaataaacaaaaataacattcactgggcacaatgcccagagaaaccagctacacaaacacaacactaaaggaaaaagatggtcccgaagagaggccaaaatggttcaagatgcagagagctcaacagcaaggggctccagagaagcttcacaaacacaatcctgagccctggcagatgtcctgtcaaggcagctaaaccctcatcacagcacctgtgcacagattcctctggttagtaaacaaagttgctattcacatattctctatgctttgtaatgcaaaaaattaggttgaattatatcaaattgccttttttttttttttaactaggtcaaacagtcaaatatcaacaacttcatgcacttcaacccaacataaaataaggagtggaactcatctcacaatgtctctcatttttttgtcatcatgaagctctttttctgggcacctgtagagaggatgaggtaggacagtctcttgcctactggactgagccacatcgacagtatctgaggatctctgccccgcatcctcagtgtagccagcaatgtgccaggtccctgatgcatgcaattctacaaatgttagagaagggagagaaacaagggggcatcattctgccttccttgtgctccaattattcttccaactcttaatcccttttgcttttatcctcatggaacatggggtacttaatgtgaaacaactttaacgttcattttttccaatgtattaactttataatggctagatgagaacacaaatatagtccctccccagtttggatgggggtaagtaaaaattgtttttgaaaaatgaatattcagatgtatttttcaccattatagaaataagagttaatattgtgatgaaaagagctgaatacaacatgaatgtagaactctatcatatttcaagacagaaagaattttttctaggacttgagagtacttgaccgagtagagtgtagtttaatctcaatgttaaatagtctttaagaaaaggcagataatccataggttgtccggttgttaaaaatcaggattaagctcctggtcttagttaatagatgtgttaagtaaatgaatgtggctagttttatgctatctgccatataatatcaaatttatcaggtctttgaagaggtgccaacaaaacacctctaaatccagacagaattttagaacacactaataattaaacagataatgaaatttaaaaaatatattacttgagtgttactattttccaagaaacacagttgttactccattatttttaatagaatctatcctacaaagtttcccaggcaattctacgaaaagatattggaaaacagaaatagcatttttgacattcaagcatttctacaactttaatttcagaaggaaaaacctcaaagtaacaaatatatttttagggtactgaaagaaaatatagctttaaaaaaatgttaatctttactctcagtgaagagaatgactatgaaaactgaccagtgatttacttactcaaaaagcgacctgactttgggtttatgaatgtatattgaaaaaaaaaaaaaaaggtaaatctgccttcaagttacgacttaacaggagttcggtgagtccataattagcacctcccatggcgggttttctagaatcttaacacagaaaacctggaatgcacatcttatttaacaacctgaggagacagagagcttttcacaggcaaaaacacattatgaagttcattaattaaacagtgcgggtggagcagatggatgctacctacgcttgaatgacgctaaattgggacagaggtttgcagtccttaatgaagctccataaaatgaatgattacatagtgatcacaagtaaacaaacctgagagaagagctggattatagggcaacaagtcctgcaacatggtaacaagaagaccaacatgcatggaagcacctagtacacagagaggctttgacatcattcaatcccagaccatccccagggttgaggaaagctgtgtgagtctacaaagagttaaacatgaaatgacagtcggtggggcaataatataaaaatgcctggccatggaaatgaagggagcagaaacctttttgtcacataaaatccattattgagaataagacactcaagtttccttttatcttcacagaaaaacagatgcaaaatgtcaggtacttgggctttttaaactaaaaggcttagcaaaagcagctagccagctaatgtgggcattaagattatttttcaatcatactttcccctgtcactaattaattcttcactttttcagctattgttaagcccttaacttttttttttcccccggacctaattagcttgtgatgcacatgaacttgcatgtctgctccaaagatatcttttgaactcatggggtagaatagaaatcattttgatattaaaaatttcctataaatatatgctgttgtctggaacttattaggttagaatgacctattatgtcttccaacttatacaaaatataatttcattaacagtaattgacaactttagaacaagaatggcccgaagacatgtggtagctacaccttacagcaagcattagaggtcagcagtagtcaatggggatgccctgctctgctgccagagccatgactgtggattctctgtatgccttcagatgatactcttattttcatcctcgcttcctgggctttgattttctctttctcattatacatggcctttatgtaagctctttcaaatctattttagagagaggtagaatataaatggattccacatatacaaataaatatcttgctagcaaaaagacagaaaaatcactgtgatggaactgcgtcctcaactatttctcaaggcaaaagcacactaactaacatcaattagatgcttattttgggatggactctaagtgggatatgccagtaagaatatttaaacttaatattttcactgctttttaatttggaagctacatgtatttaggtgtaagagatgtacacatggtatcaaaacgggaatactttccatcctaacttaacgataattttgttttcatatttattccatacaatcaaggtttaaaaggctaggattcacttggtaacaataatgagagaacaagctaaaactaattggaattgcttcactttctgaaagctatatcattttgatggtctcctattcttaggtcaaaagtgtgcacaaatgagaaacagcaggcggccatagagtcaggttggtctgggctctcatcccagccctgccctggctgtgggccccaggccaagacccagcttcctcgagcttcactctccccatctgtgggttaacacagtcccattctgcagggttgtcgccaagagtgagaataatggtccaacagtccttctgggtgcctgtgatcagcctgcgcttttgcacatcgtgcactgatgttccaaactgccttttggagctgagtttactctctggtccattggctgatgagaaagcattttatcagttacatgcagacactaactactgaccaagagttcaggctcagcagtgtctccacttctgtccttaggtaattatttgaatactccagtgaattttgccctcatttcataaaaatgagtggtaataggataaaataaaagtactagtaggagcaacaacaaacatagctctcaaactcaaggcagtgaaagcaaaactagaaatcctcacatatgccaaacgtggagaattttaagtgcctaataaatttttaggcacaccaaatacacaccagcttatttccaatggcaaagagcaaaattagagagcatgcttgaaaaatggcatcaaaactggaatatagaaagtgaggcccacttagaaattttatatatttttgtttcattttcagagaatagaatgccctttataagttagatgtgcatttgaattcctatctgtagatcagaaagcaaaaacttcagacttaaacatgaaaccaaaatgaaacatcaattctgagtgtctagcctgctccccaaaagacatcttttgggcttccaaaaagtaatctatttttaaaaaaatctatattaccctcttaggttgaagttcctttataaattcattcatttgccaaattctgattgcaaaagtgctcatgtgccagactggctacaaaacacttactgatccataattagaaactgcctaatcatttcatggttgcaattcctgactctgaaatgtttaaataaaatgttcagtaaaaggttatttataaaagaaccaatattttgatcactacttcaaagggaggcctgattgtgtaaatgcaaataactgccttattttagtacttaaggtctcagattgaatgtagctatctattagcacaactgatccaaagtttaggagggacattcttttagaagatcccatgtatttattttctagtttgaaaaatggacattttaatataaatttataatctaaatttctgttgccagaatttggttaagtgggccttatttagtatactagaagagactatgcaaaatcatattccacaaaagaatcaacattctcttatagctttaaaatactataatgtgagcttgaaatgctccacacctgaattgataagagcattaggcagtagtttctatgaagcttttaaaagagaaagttaacttctactaaacaattacaagtgttcaactaatacagtgtcttctgaccgattttctaataacagcttttaaaataaatctaccaaactgttttgactcttccaatgtaaaaaagaaattgaaagttaaagcttaaaaattccccatatagagaggaaataaacttaaaatagaaatttaaaataacttcaatccaaagtaaagcaaatcgtttcatacactttcagtaagtataacaaattttatatagtgacccaaaagtcaccattgtagagctttgcaactcaagacgttttagctggaggggttaaaagtgtgggtgtggaagtcagcttttgtttgaaaaattagcaatgctatgagtcatcgtgcattagctgcagaagagttttgcatcttgtacgaatccagacaccatatgccatgcgaaggcctattactttattcggtgccaccgctgacaggcagccacgtgggtatccccagcggaagggctgtctcctcccggcggcgaggacaggaacccagtgagctgaacacatccgacattgtacggagcagcaggaacagctggtaagctagcaagcggcaacggcccagcgaggagcgtggatgctaatgagcctggcgacaatgccggccttcagaggggtaagtgcaatgtcggccggcatgttcccacaacagcctcaagagtagaatctgctcgttcatgccttcagtctcattaaagcatgatactggtatttgtggcttatcaaaatcagctgtaaatcacaagttataaatccgaccaacagatccaacatgatttaaaatgttgcactgaaatgcaagtaaaattccacaggcatctttgggtcctgatggagaggtgttgaccaggcactggggtggtggggagccgtgagttgatggcacaggtggagcagctgctgctggttcaggtcctggttaccattcacaaaactgtgtggcctcaggcaagttatttaacttttctgggcttctgttccctcaactatattttttaaacataaaaaagtttgtgacataatagattgtgttaagacattgcattgcgtttgcataatacattaaaataggatcataattgtgccttcctgataggattgcttaataactgaataaaatatgtgaggttcttagtgcctgggacagagcaaagaatggtgcagctaagtaaacagatgtctctccaggtgacccaagaggacagctccaagcagcttcacctcctggtcttgttcttctcacacaagacaagacagtagcacatctccttatgagtgaggggtctatggcatgagatgggggaaggtgtctggcagacacagtgagatgagacagcgataagaaggggagggagtgatgtgtgcacatctgggtgctgtggaccccaatctgattactgcggggggtgggtttgggctcctagcagcatctgaagctccaagatcaccaagtttcttgatggttccaggtttaccaaaggctcttttccgctgaaagtcgtttactttttctgaatgctcctttcttccatcaagtccctgtgacgcctattcaccctccaattgccaggtcacaggccctctgtgggacgccttgaggctctgggctgcactctgcatcacagccatgaggaaactgtgcactgctctcttccctaatgtgctctgtattcaacaaagagcccctccagggtgggcaccgggccttccatttgtgcacccacagcaacagcacagtgcctggcatacaggaaatggccgatgggtattttgttgaatgaatgagtacactaacgaaaaaaatgcttttggacttttcagaattggtgtctaggaatatgaatgagattatcagattatcagaatcagttgattattttttgtcaagatttttttaagccctaagtaaaagacattttactgaatgatcatctccagcaagaaatgcaccttgcacctctatatcgtagggcaggatgtgtgtaaatatgagagagaactacctggttcttggagaaaaacttgtttctcagaagttttcctgtgagctaagctcaacttaaggggttctccgaaggtgttatctgtactctgtgaaaaatggaaaggatgcagtggcctgtgaggtgcagattagtgaaagtggccttaaaggtgagatgatcagcatagagtttaaaaggccacagagctcgaaacaaagattacatcccaggagagacctttgtgtaaaatacagtgtgtcattcactaatgaatttgagcatgtctgaatttggaaaccagtcctctctgaccggcaggcagctgctgaggctctcgcacacagcaggcatgacactcgtggctctattggccactgctgcctgctccttataggaccagcacacaacagtggccagaaaccctggttcaaacttgtctcccacatatttgctttcttcagatcagcccttaactttacgttgtatcctgaaatccacagataaaatcaagataactagatatgggaatggaatgaggattggaagccaggtaaagaactgaagaggcttttcctgactccccactctgccttccaaggatgccacaggggtagttccaaagctaatccctaggggaagctcctttggcctcagtggtccagggaaagacagatcttcactctccagcctctcacttggtcacagccattcaaagacggtagtgacatccaatgttcattgtcttctaatgatgttttgtgggaaagtacatgctagagtaagaatgctcttcagttactggcatttcaaatatatatatatttttaaagttttaatgttttaaaaatacccagactagaaataattacagcacaaagcccaggtctgtagtgacgcagtgatggtctggagcagcaccagggagggctggtacaaagtctgagaagggaatgaatatctgtctgtaattcacacatgcatacacaaacacaaacacatgtccatttccctgaatcaagtttcagaggaatggtgatccatgacggagattataaaaagtacacattacaaacagaatgtgtccctaggaagggtgttacgaatctaagccccggagctgctgcctccacagtcccgtgtaatgccacctaagtgctctgcctcgcatgacttgctgcaggctgccacggattagagctatcgatcgctgcctgcagaagggtctcgctgtgcgaaaggaaggtgagcgctagagacagacagctcaagtatcgatctgctctggcagaaggccgtggttccagatgcagagtggcactccttcacatcacccatgagttactataacgtgcacggaaacactaaagagctgggggatcgggccaaaggctggaatgtcatcaccacctcctcgcctgtcagctggtcacgagatccaaagatgccatgtgaaatctctggctgtttaaaaaacacaggcaacaaaagcctaggacgggcattcctatggtcttccaaggcagaacggacaaaccactgccacagaggactgccaagggtcatgttaagaagtggtcagagaatgtggatacatctttaagaatgttcctccagcggctgagaggttcaccagagccatcaggccggctcttactataaaaagacacaatccttttccccactaaaagctgatgccttcccctacttaaagcaaaacattaaaaaaattggtccaaacggacattctccttaaagaaatctcaatgatacaatttatatggttttcaaaagattttgggggagacaacttccaaggcacaaagacataaactcatctaaaaagtcaaatacaattatgaggtacatcaaaactcatgatttttgaaagcaatataaaattaggattcatgagaccaagttaaagtgaaaataaggagctcaaggaaatcaagtgtaacaggaacaaaatgcacgctttcaacacttgcttctgtggacacaggagcagagtgaactctattgctttcatgacttaactctctggatttagaagtcattatttaaatcagttatcttttcagtatccatattaagtcatttcctcccatgcacattgtaaagacatcctgtggtgtaattacataaatggcactagagtctactttcccctaattagaaattccttaaaatgtttgcatttctgattttaatccaactaacatctactgacttcttatgatgttagatgccggagactgaaagatgaataacacatagctttacctttaaggagcttgctgaccagtggaggggcagatgcctcatagtgagcccctcacccagtgtggtcagtgctacaccagctatggaagacagagagaaatgtccgttggcctgtggccctccttggacaggcaggctgctgcttatctcacaacaggctcactctcctcccttgaatctaggctggccttgtgacctgctgtggccaaatagttctgagacttccaaagtgctattgtgaagaagctggcacctccacctggatctctggagcctgtagcagccatgtcagaagcctgactgctgcgagaagacccaaactagccaagtggaggggctgctgagccaggtatgcctggccagccccaagctgttccagctatgccaatgcaggtgccagatgtaagagaccctgggtaagaaccatccagctgagcccagtcaacccacagaaccatagaagagcctccctccaccattttgcctttaaacatttctgcaaaaatctttataaagttcctttttttttttaagtgacagtgtctgcaggctattcaccggcacaatcatattgcactacagcctaaactcctggactcaagtgatcctcccacctcctgaggagctggaacttgcaacaccatgtccagctcttgcaaaaatcatgatgcttaattttgcaagtttgcagactctcatgtgagaagacaatgttaggacttctattaatatttatctttttatctccaatgatgaactcaattaagctttactgaaatttaacacgtgcctgacacttgcacccttcttgctaggtcatctatcagactgtcctaggtcaggttcaatgtatgagctgtactaagaaagagaaggagagggagcgaggggctggcagtagagccctcatttactttcagcacagggagaggtaccatggtttacatgagcctccaaactgaagtgttgaactttattatcctataaatcgtattatctttacaattcactgttctgaggcagagcatgaacatggaaatcttttgtcgcacacacgagtttgccatttatctcacaggaaagatcttataaaagctgaaatttgaatataaagatgagttgctcatttttcttttttatggaaagacaaatgtcctaaatttggtgaccttttctgtgatgacaaggagctgaattcgttcattcggcgtgtactcactgaaaaaatatttactctgcagcaggtgctgaggctacatccagggttggtattcacctggaaaacacccgcatggctggcgtcctggtcagtgccaaactggtgtccttatgtacccactgttaaatatttccactctcacccttggaggcaccagtgaacaaagcagacagaaatctctgccctcacgcagggggcacggtgtgagtaaaatcagtgaattacatagtaactgagagggtgataaaggctgtgggaacacacagcatgggcagcccaggcagtgctgggaggtgtgggtgcacatgtgtgcggggctctcgcatagggagacagtgaagaggggccaagggaacatgccacgtgggcatctggggagcagtagaggcagggggcatggagggcacaggcctcccctgaaggcctggatgctgagggaggcagggcccctggtgagggtgagctggcagtgacgtggctgactcacactttagtcgctggccctggctgatgctccgaggagactggggaggaggccacggtcagcaatgcgcccttagccattcctttaggaagaaagatactgctcccacaaaagaaaaggagagcgctgacactgagtgagagagtaactgctatttgaaagaaacatgctgtaaagagaaagccttcaattgagatgttggaaaatgttgccttcagcatgggaatttattgtcgaagatggtttctgttttcagaaagcactcatatctctactatcaaaacactcataaacagaattttatttgtttctaaacttccaaataagagctgagtacattttgaatctgtttgtccaaaaaaaatacattttttatacatataatatatgttatatataatatatatgtattttttatattacatataatacatatgtattttatataatatataatatatatgtattttatatatattatatataatatatatgtattttatatatattatatataatatatatgtattttatatatattatatatataatatatataccaatacaataagaaatatatgagctgtactaagctgtactaagaaagagaaggagagggagcaaggggctggcagtagagccctcattcaatatatatatatatagacctatatatatatacacacacacacctatatatatatatacacacacctatatatatatacatacacacctatatatatatagacctatatatatatagacctatatatatatagacctatatatatatagacctatatatatatatagacctatatatatatagacctatatatatatatatatatacacacacacaaataaataaaatatatatataccaatacaacaactgatctcacatcaaggaagatggaaatttccttccaaatgtcaacaggaaccttcatagaactggtggctaagaatgtaaactgagcacgaacctgtgatttaggaggtcaagacaacaatctgctccagctggtctatgtcctctttgcaaagttttgtttccggctatgaaaccaagttatcaaaatacactgagcttagatggaccccttggaatcactgaatcacagaactattaaactaagattataaaaataaagcagcacattttaattccactgcactcactaaagcactactgatatcctaataaaagcaaaacaattttacactattgaatataaaatacttcagattactatttcctctttattgcatcctttaaaaattctcagtattgactatactttatgtcataatgtactagtaaagcagaacttgtacatactttaaaataaatcagtatatgcactactgaatggcatgcttaagaggtttttttgctttttttttttttttaggtctttgggtggggtatgtaataagaaaaagcctgcaggcttctgaggtaggtagtgggttggaggcaggtgtcctcacccactaaagtgaggactgcgacagtccggcctctgtgccctcctctggaatggaatggggagtggcgaccatacagcctcaagagcatgctgttcaccaagacccttgcgccctgaaaaaatgccttagcaccctggaatgggccatggacaccaatataataaattataatcagcgtatgaatatctttttgtaaaacaaacaaattaacaaagttatgacatttcccacctatcaagttatagatgacacacacgtgaagagataactaatgagaggtacacaaaaacgtgaattatttgaagcagcagctagaaataatcttttcccttcgagctcccatgacccactgattctctctcttgtatcttgtgttgcagtgactcaacaaatactcactgggcactgaccacatgcctctcccagagcataggctgcatcctaccctatgtcacagttataacccatcctggctgtgaagccccctgaggccactcacctctgcctgccctctacagtgcttgccacggctataccgatgttggttgcaggaagaacacagaagcatggccaccctgatttaccatggcacatgtggcagggtctgggccctgagatgttcttctagttggggctgggagaacgagcgaggggccaggccctcctctacactgctgcatccatcagctcaaccgttcattcattcttcagtctcatatttatatatacttcattccatacatccttacaataatctgtcttggagggattattttcctcattttagagtaaggaaactgacagaggtaaagtattcaaagccaaaaactaagttattatttaatttaaactaacatcaaaacccaaggtctgaggtcagctatgacatgttacctgctaagctgggcatgacaataaacaagatacactttaaaatttatctggcacttgtagtaaaattgctgccatgaaggaaagagaatatccccaaactcttctgtgcaagaactcttctcactgagaaccaagacttgaccataagggtccagtgttatggtgtcagttacacggcccaacatgagacgtagaaaaaggttttacattgctttatgtttcccctaaattaaaaaacaaacaaaacatgtttactatcctactgagttattgtcaggggcattttagttaaacaattggtctacataacaaacccactgaggaaactggcggttcagctcgtgcacacatatgggcataccagctctgacagcacacagcagctctggaactccaaagcatgactgacctgctaccttattgaatcttgatgacctaaaaaagtgatcactgggcaaattaatccagagagaaggagtgtggaatcagagtctggaaatttatgtcagagaaagccaatataagttaaaaggaaagcgcatctcatcccaatctgagctgaaacccacacttaggctaaaattctacaaaaaatggggtggtttatgtgaagtgctttccttagtcaaattttctgcaaaaattatatgcatttgacaaaattatagagcataagtacaaaaccaatctgtttctttttattcaaataatttagatgttgttttctgatgtagtcttctgatgtgcatatgtcattataagcaaagaatgtttatcctgttaaagaggcatacattctatttttctaaatcaatgagtaaacggtatttctgagacattctaaagaggctcttctttttataggggttaaaaattatatgaaaatactccttaaatttaaaactaacttacatttttactgatattcttattaaaattggtttctttggagtataaattcaatttaactgagttcaatttttttaatttcaaaagtgggaagaaaacacacatcacagctaagccgaactctcagcaggcaaatgtaatgtgatgacagttgccatcttctgggagaaagctatggctcttggatgttaaaggcagagcatgatagtaagcagcagcagctctctccatcagctctacgccttctttaaattccactgaggatggcagtttggatggagaccccaaaatctattctgtccatctgttttattattcttagaacaactgtcaaaagttgcccagggatcaagttgcaaacatactaatttgcctttgaaaagtaggccctgggggaattctggaactctgcttataaattcagaatcccatcagccagcaagcctgccctaccctttgtggaggtatgagactttgcacttccaggcatacatctgcctcaaagccgggatgcactgatatactcacatcccacttcataggcaaatgaagggagaaccaaagggacttggcatcttaagggctggcttgttccatgacaagcagaccctgaggtttcaggaggcagccccttcattggtgttggattaaggaccaaagctttgtgctggagagtttaaacaagtggacaaggcagagggacaacatattctgtgctcttttatatcctaggaccaaagaggaagattgaagaccgaaataaagcattagaaaaaataagctaaggaaagataaaaatcataagccactaaacattgtagcatttcatttttgtgattctgatgaaaagagttacaaaaagaccatctgaacatacagaatatcaggtgtaggttttctaaggaataatgagaaatcacccaagagttggctatttaaaatattgtggcattttggggacatgctatcctactagaaacgaaagcagctgtgcacttctcaagttgaatgtgttaaagccatgtgcaaaacacaatgtaaacattaaagtgcatctggactccctagggctggcacacgggacacctgatcatcacggaggagaaaagggagtgggcaccagcacagaaccctgcagtatccttccttcctccaccctggccccaatggtctctatctaaggctttcaaagcacagggcctcagaaatgtatctgaagcacaaaattcaaagtaccccttttagagtgtggtaaaattcctcagtagtaaaacagaaaggacaccctttcaaggctaacatgatggcatttgggtcgtactcacccctagattaccaaaaaagtattctgctttcattaaaaaatttacttgagtgtgttgcaaattactccagcacggaaacctgctgggagctcactgtatacgccagggcagactctgcacagaagggaccaccatttggacttgcctgctttgtccttctttggctttgcagcgtctcttattctaataaggtatgtattatcctttttagagatttgaataacagaaagtctcactttcaaaatattgcttataatcccagagtccactaaacgttctgtggatgctgtttatggcattctgttcctttcaacatgggactgataattagtaaactgaaatttgattaatgttggattaagaggttctgatgtctcactgcaatgtgttatttcagtctgtgggcaccagaagagattgtctttaggaaacttgttcccttccctttccagaataggaggatgggcttaaaaccctgactttttttttttttgttaaagaattcagtttgtagtcaacagtttataatgtaggattcagttttttttttttctgtctcactgttttttgtttgttttctcactttgaagctggggccaatgaattaactatttaagagagaacaaaataaacctgaaataaaagtcttcttccaaaaatgccaagggtgggccttcctggttgagtaagtgatttggcatggataaacggttcagacagctttagatctcaccaggctttgtacccgcttttgataatattaagaactcctctgaaaacaaaggagccgtgtgatataagtatcaaagcctatgaaaatgactagataatatttaaagggaaaattaataaatttagactactttgtgcttttttaaattatgatttttattaggattcattaggattataaaaagtcttgtaatggccagacttttttctatgcttcatggccagaagattccatgtctcttccttgcctgtgttttaaaatttataatcttgtttgcctactgctgaaaagtgtggaagaatcaggaataatggctccctttgaagctctgtcattcccaaagtaaccatctgaatgctaaagaaatattgtcatttatggaatgaccttttgctctttgaatactcagacattaataaatgttaaatgcttagcaatcctagcagcactatgaaaaaggtaagttgggtcagcaaataccctcttgcatgcttttgatatgatgaccatttccacttttctaacagctttctaatagcaaaaatgtatttgggaacaacagtggaatttgtgtcatcatgaccaaatgattacggtgcaaacccgagattcttctggggcccagcaggcttctggtccctatggaaacgaaacctcagatattgtcctccactcagctggaggacgaagcgccaggaggcttttgtgcttggtgagatttcttccacaaccttcccgcaacagaccctagtgcttcctccagactcttttctaattgagatgcaaattaatctctctggctgattacacttcccttaaagctactgacaaatgcagctgtaaccagagtttgcggactttccaacaagtgacttcagctgtcagtatttgcatgctcagccaaggcccgcccgctcccagtctcagagccatggagagcttcctttaggcattacaagcctgttttatttatgtgtatacaatttacatacaattaagagttaaaaacaaaaaaccacaactaggtccctaggatttataaatggactctgacaatgaaattaggccttttcagacacttctttctgacccaggtctagagagtcactcctttctcaggaggccaaggctttgatggtacatttccctcccacttccttcttgtctgcaaggtttctgactttaacaatgtttgaattcaatctctctttcaaaaaccaactaaataaactaatggctctaagaaaatgggatcacttcctttatagtgatctcaataagattctgttaatttaaaatcaaatatgaagttaccattctaattgccaagatttccatataaatgtgcttcaacaacttaggggtgataatgttagaatgattatttagagcacaataaaaatatgcacaaaacacccagtaagaagaaaaaaacacaaaaaccaatttttcggtaaaaattatttgcttcctcttgaatcctatctatttttgagttcctactatgtgtcaggtgctattttaagtgttcaggatccagctgtaaactaaacattcaaaaatggaaaagagagagttaatgtatatttatatacatacatatgcatacatattctattcctaaggctatatttcaccttaggcaattaaggccttcaattttgaaaaagtatcattttataaaatatgatttacttttggcttctgttttccaaaatgtttcttaccaaattactctccagcttcttccctccccccgcaggccttcacacacacacacacacacacacacacacacacacacacacacacacactctctcatactaggggacagcagcagaatggacacaaggcccccactgggaaagccagcactgtggcaagagtgccacatctgagacagaggatagaggaggttcaggctggcaaggagtgagtcagagcagagacgactatgggagggtgaggggtccttggcacaggagggcctcaagggcagtgtgaagggtggggtatagcagagtggctgagaggagactcccaggttaggggtcatcccagtgggaagcagcacgctccctatgatggttggtagtgagatgcagtgacccactggggatggagctgagagaggggggaaagagagaaagaaggaagaatgaggctgttcctgatattcccctagggggagcatcagcctggtttctccacaggctgtgaggttgagaataacttctgaagggatggtcttttttctaacagtgagatgtcactctatagcaaaaatagcagagtgtaccaccttctctcgagatttctcctgcaccttcgcacttctcacgggcctcatttccatgcaccaagagtggagggcagctcctaccccagggaaccagcctttcacacagaagaggaccttctgcaaggcactgaatgaacagcattctaccagcctttattttaatacccacaatggtaaaaaagtaaatatttcctgaggcctaactccacagttaggtggttccatttttacaacagaggtttgaaactccagtatctgcaagggccaggctgataatatacaacaattgcaggtaacgtttgctgggctttcaccaaggaacaggcactgttttacctgcttggcccattagccctctcaccaactcagagagaccaaatggtgggtgccatggtggtggtgcctggcaccaggcctcagcactggggagacaccaggagggactgtggtgaccgtgacagcacatattctgtggagagactgctgtcagtagaaggaaggccccatagggtcagatattctgattcttcaggagaagtcaaaagtctagattttttaaaaatgcaaactctcccaatttttcagcatggctgacaaactcaatttttagtttagttttttggtaatgtgaggaggacaactgcagttaaaacaaagcccatctgtgggctggatttggtgtgctggcagctggtctgcccactctggtttttgaatgtttgacttgacactgagataaagctgcttcctggttgcttctattcactggtcacagttctgcagactgccatcctcttttaatacctctcagactcctgaaacaattacttcttggttttaatggctctccatttggttacaatttctctggattggctctgggttggtcgaggtcccttttaaaatgtggccccagggctgcacaccacctttggatgctccctgaggctgcaggagcacaggccgtagttcctgtgactggacctcatgtttcctatgcagaggtctcaagagaatgctggtgtggctggctgttgcatcactctcatctctcatctccaatctgtggccaaccgaaatcctcagacattgttcacaatgactgctatgaaaccacatcactctcaccctgtactcaggcagctgattatccaaagcccagtacataacgttacattttgccctcttaaacctcatcttgctggcttgggcctggaagtctctcatctgttgagataatcctaatgtgtgactttgcatcgtgtcaaattagttaaccctctcagctttctgacaaatggtggcttgataaacatgttttagacctttatgaaagttactgaaaaaactgctgactggaagacgggttaacagcaaagctgtggcatcgaaaccatacaagacacacaaagcttcttgctgactggtgcccatgaattaatgtattttagatttggtcacagtgaaatcacccaactctcaggggcccatatttctctcttatacctgccagatgatagtattttattttatattttaccaaaatcaagatgtatatgcttcctctaatctccgaaaatagtaatcttataaaacacacagtaagtgtgttccggatactttgtcaacatattcatttctgaaggctcacaggctatttagtaacctagtctaataattttacaaaggatccatgcaacattccaaaattcatcctttaatcctttttgaaaacaaaatattttcctgtttccaattttgggtacatcctttattctacatgatttctaaaaaaatatttcttgtggttctgagattatttgttctacagccagatacacgtggccctgcagtctggagcttaggtgcaagagccattgattgattgattgattgattgattgattgtattcttagcgacttgagttttaatttatccacttaggcacttctctgtcccttcccatttgaaggagatgtgatagagaagacggaagtcattcagatactggctaacagtgcccacctgctaatttacagagtcaagagctcctctttgaatcttgatgtgagtattttaactatgaacgcatcagagaacgcaaccttgtgcagctatattggttgctcctccaggcctcccctttttctttctcagaggaataattttaagtttttaataaaaatccccttattaaaaatctctaattcctcattcccttttacagtctcagcccacccaggggaatatgctatttcttcctctgaactcttctttttgtaaggtgcttcccaagtgtctagggtacaggtctaccaacatttttttcccattcttcttcttcttttttccctcccattcttatacaaactctactgaaagctcattactttttgcaacgtccaacgtcaaaaatccattccttcaaattactaagaaatggatccaaaacaaaaatagtagtgcctcttgtttgcatctctcagaagagagatgagattgtctgccagccaggaatttatcaaacacatgtcacctttggttgaatgtatgtcagagctgatatcaagtagtagaaatccccactacagctatattttgctttgggcctgtttagaaatttggattagaaaagcatggccatccctcccatctgggggtataactccattctggctgccgctcttcaatgcagcccctctccccatgcatttttcattcacaggcacgtgttgacctcactcaggagtgtttctttgtggtgctgctactatctgatatgttttaacatcttaccttgcagtaattcagttctaggtcctcttatacccaatcctccaggtgaagacttgagtctgctagaaccagtcatgaataaaaccacccagtaggatgtctctttcttggccagtctgctgaaactaacccttcatttctctctttcctgcttttctgtgaaaccattctctcctattcccgtctttctttatctctgccccctcctttcaagccatttcttcaaatggcccagagagttctgtctgcgattctgttctcataccaccaagagaccaccgttctattcttctcattctctccacacccccacaaatctagcaggtcccacactgacttagtccacctcctttacctagatatccaatccatcatccctgccactgccttcgacgagacccctgctctctctcagaaccccgtccatggccccttaaatgtttccatcacctccatcctgtgtgtgtgtgtgtgtgtgtttgtgtgtgtgtgtgtgtgtgtgtgtgtattctatactctgccatatggaagcatctgtcattctcaaatgtgataatatgatgtgctctttcaaagcctggtccatgaacaaacattggcccctcatttggagtatcttcacatttctattcctagcggcaacgactgtgcctggcacatggcaggggcactgtaaatgttgacgaatgctaactggtgctgcccggcaaaatagaacacatggtaccatttgacttattttctgaaatgtatggagatgaatggaaaaaataaagatctgtccaggaaaaagaaccaaagatcccactgaacaagaaagaaacaaggttgttatagctttagggagaggagtcatttttgaagatgtgaaaattcgtagcagaatttagcaatgagattccaaagtcatgggtctaagaggggacactctggtactatcaaacacatatgttaactgaaaatgaaagtacatttcacttgtgaaagaatgagatacaaaattattttttcttaggcagcccagttctctccatcaaatgctgatagttacagcgagtagagatggtgaatgccattgagactattgttctattgaagtggacgtttattttaaaaagccaccatctgtttgattcagggtgaactcctcctaacgggcacactgcatattgtgtggcaaccttttccctgaaacaagttatttgatgagaagaatgaaaaccttggctcaaatggttgtggaaacgtctatcagttgaccacggtttgattttggaatctttagtcggcttgggaatggtaaacataacatgtggcaagcttcccatttacaaccctctaggcacaggaataggctctttgattgcccatgagggatagaaaaagcagatggcaggtgagttggccctcatcactcagaaaagcagtggccacaagatgaaggctccacttgacaaatttgatttagcctgcagaggacatcacaggagaacccaggagggacaaaggggctgcgatgaaccgttcctgagggtgctttccaaagatacccctactgtgcttacatttttttttaatcatataagacaatggtatttttcagtcttctatgtgcctttgctgcagagttccaactgttaactcagccaagggctcccaaataagaactgctttgatattgattctaactgcatttacttctcaaaaagacccccaaagggaaaatttgctccagcaatgcccccatccttagcttaattagaaatgtttcattttcttaaacatagcgaacaaaattaatatgtaactgcccacatttccacttctagttaaatattataaaaactaaagcccaactgacacgattttaaggcagtaagtatcagtcattagctggggagaggacagagagataagaaaaactactccaaagtaattccactggctcgtttctttagttgtcatcttagcacagcatccagagtaaactcccacagctgcctgatgtcaggtgcaataagtggggagggagtgtagggcccatcatgcccagcatgtgtaatctccccaagggctgaggagatcagcagtaccttgggcacacctagaaccggggctggctatataacctgagggtcccagtgcaaaatgaaaatatagggctcctttttcaaaaaataggaaaaaatgcctttaaaggtcctaaaatataaaggttttcctatttgtctgcaatctctcaacttgtcatggtattttttatttgctatttaatgttattctaacattactgttttccattttatttgttttctcttattatattccttatttctgtcctgaatattagcccttctgcagacagaaattaaaagaatagagtagttaaatgattgcaaagttttccccactaactccatctctataaaaaattaggtataacagttgatttcttgttttaaacaatttatttgaataataccaattaaattttctccaggtacaagacaaaaaaaagtttaaaatattgataatgatcaacataatagtttttaaaatatttttcctaatttctgtactacattgttgtttgagatgtcaagttagctattttgtgagttagagtacatttactaacacacaatagcatcagtagccctagctggtatccacattagtcctgatgtgtcactgcttgaaaagttttcaaagtgattctgaatagtatcctttgaacttttaaaaataccattttccctaaacctgatcattccaattgtatcacattaattcttatttgagaaagcagtgttaaacaaaataacaaagcaagtattttataatgagaagttcagtaagtagagaaggtgacatgacaaaagtcacaatggaattaatataaaatggaattttctcatttgtaaaataagattttttttttttttttttttttgctgccttggtccaacatacttgactgatgcgtgcccagctcgtcctagttgacatgcaaactgacaaactaatcgctgaatagttctttctcatttctgccaagaggctctttttaatagtatgtgaaataaaaactccatgctgaaggccaaattgacaccagccacaagattacgtctacagtgttgtggaaatcactgcaaagaatgccatctccaaaacactcaccaccagcctggacaaagcacgagagagtacactgaagggaataatcctgccctggcccccaggggagggaccagatgggacctaatagctcttttctactactcatttctatgataattttaagttgccacatggcatatgtatttttttttaatctaaaggcagaatatcagtcaatgaagtgaccaggattttaatgaaaggtattttttcatgaaccgtatctattcacatgggatagttttcatctacccccaactctcacttgctatagcaacacatcacttactatcaggttgggagaagtatatatagaggtcaaacacaatatgtttcaaattattatcaataccaattagaaacaaagagattctaagttttattaggaggtcactttttttgcatcaattttataaggtcacccatcttaatctctttttcttataacttgagatcatgcttgaatttaaggactacagcaggccaattaatgtttgaggaaaaaattttaggagtgaaatttattctgtttttggaaacaaaatcaggaactagagaaaatatcaatgatttgggaaaattacaaaagaatttctagctattcctattgataagtccaaatgcaacttaattcaggacatctttccctctaccctcaaccaaatgcaatttctatctcctctgatcttccagaaacctacttgcacttctcaggtggtacctgccacattctttgatttattagggtcatttcatttgctttggtttctggtaggcactctgaatgagcgatacgttttgctcagcatcccaccttatatacaatggactgccacaaataagagggatacaggatgagactgaacgtggggcaaaatacctaagaagatatgagcatctcataatggtcacagcttctcagacacaaacgtatgtgagtaaattatgaaagtaaactctaagtttaatgcagcataaaattattatatttaatataaattaacaaatgctatgaaaaaccactatgttatttttaacagaggttgaaaaaaattctcttccctcttcaattcagttttgaatacttacctcttatgaaaaactgccaggaatcttgattctgggatggttagtaagttacacatttaaagcaaaaagatacaagctctggtagagtgggatgaggcacttcacagccctgctggcgttgatgcacgtggcacatacaaggcttggcagcagcttcccactcactatggctccatcaaacagaggcccaaaaaatggaacctgttgatttgaaatggaaaaacaaattttaaaaactgataaaagtcaaatcaaagatatgagagtagctgactgatgtcagacctgcaatgagcacttaagctgtcacccacagagcagacgctgaccttaacaggacacaggtctagggctttcaaattgagtgaagcaggactgccccacaatgctcctttactagggattcttcagcaaaactttcaatgacaaaattttaccaggttcttcgttttttctcttctgttgtcatttacagaaatggtgttgctcttaagtgcctacatcatgtgaattatgcatgatacacagacatgcttcactgcacactatccttgcatctgtctgaaaccagttatggaactggtaatgttcctgccatgggtcctgatgtatattaactcttaaaggagatgatgatgatccctgtcaacaactacaaagtcctacacagtcctcattcttctcgaccttttccccctctgcttccaagatactgcattaccttcatttccttctacttttttttgagacagggtctccttctctcacccaaactggagtgtagtggcacaatcatagcccattgcagcctggaacttctgggctcaagcatcctcccacctcagtctcctgagtagctgggattacagttgcaccaccacacccagcttctgtttttaatagagactggcttttcttagctgaacccatttctgttatgtggaaaactcacaagtttctgtgcttgccttttttggatttatttcttctctctcctttttcccccattagaatttctttaattttattcagtaacatgcagattgtaagttccatgagatcacaattcttacatgagctccatgagatcatgtaactcttatattcattcacttattactcccctattcatgtattcagaaaatatttattatgtgttggacactgttctactcactgcagaaacaacagtgaatagtacaaaaatccctgaatttattgagcttggaatttattggagattttagagaataaacagtataaacatataaaatatatgacaggcaggaaaagtgctaaggtaaaaataaagcagggaagagcaatataactttatttttgggaggggtctccagttggctctaatggccagggtgggctttaagaagaggatgacatttcagtaaaggcctaaagaaagtgatgaatgaaccacaagctatgagaacatctaacggaagaacattccaggcagagtaacagcacaggccttgtggtgggagtagaattagtatgtttaagcaaccatggctggggccaagcgagaaaaaggaagaattaagagctaaagtcaagcaggtcacaaggggtgctttataggaagttttaagggttctggatttctgttctgagtaagatcaaatcctcctgaggatttagggaagcaggggatatgatctaaaatacattttaaaggtattgttttggcacctgtgttgacaaaactgcaaaggggaattatggagactagctggtgactactgaataaagcaagagatggtggtaatggcttggatcagaatggcagcagaagtggagaaaggtgacagatatattttgaaggtagagttgtcaggatttgttgaggatggttaatgaggtgggagagacagagaggtgtcaaggatgatgccacagtttctggcctggccattggaaggctggagctacgttttcctgaaatggagaagactgagagggagggtcaatagctcaacttcagacatgctaagttagagatgcctactgggtatccagtgatgatgtattgggcaggagtagctataccatgctagagtcaggggaaaggcctaggttgaagctgttcacttagagatgatgtttctagccatgagatcacataacatcaacaaaagatcaagaaaagagactcaatgactatatcctctggccttccaatgtttagagcttagagacatgagaaacaattagaaaagaaagagtggctggagatggagcaagaaaaccccttctgagtagcactgtacctgacacacaattggaaggcaaatacctgctaaatgagttacattcattaatattttaaataatttaaattaatgaatgtgggtctccatcctaggtctttaaacttttctcaaaaactatttatttgtaaagccccttttctgtggttggcattggtgaaggtgcttgggatacaataatgaaggagagactgtctctgcccataaagagctgacatggtaagaaaactatggactaatatctctcagcaatgatgcaaaaatcctttataatttttttgtaaattaaacccagcaagataaaaaaggacaatatatcttatcaagcagaattttccattggaactcaaggttcatttaacattcataaatccatcagtgcaatttatttttgcaatgtgcaaaaatccacattgacaaaatacagaataaaaaccatatgactttaacagacacagaacaagcattaaataaaatttaactctcactcataattagaaaaacaaaacagaacaaaaactctcagcaaaccaggaatagaagggaaatgcctcaatttaatgagagcttaaagggggaaaaaggtgtcataattaatgatgaaagattaagtattttctaaaagagatctgaaaaggcaaggatgtctatgttcacctcttctactcaacatttttgaagatcctagtcactacaataaagaaaattaagagaaagaaagaagaagggtaggggagaagaggggaacataaaggttagaaagaagtaaaactgtttttattcacagatatcatgattatgtatatgaaaagtccaaagaatttaactagaattagtgagtgaattttgataagcctcagaaaacaatatactcctcaaatcagttatatttctgaatgttagcaaccaacaattgggaaaagacatgtaaaaatgttgtttataactgcatcaaaacagaatgaatttgataaaagaatgtgcaagacatctatattgaaaactaccaaacagtgatgagataaattaaagacaagctaaataaatggaaagatgtacaatgttcatggactggaagtttcaatattgttaagatgtcaattctgctaacattaagctatagattcaacaaaacccaatcaaaattctggcaagcctttaaaaaatatacatgtaccgaatacttctaagttcataaggaaatgaaaagacataaattagtcaagatgataataagaagacttatattacctaatttcatggcacactataaaaatataataattaagaaatcattatagtggtaccaggataaacaaatatttcaataaaacacaatacagagtccaagaatagagccatacctacatggtaattgatttgcaataaaggcagcatatcagtttggtggaagaaaaaagcctgtttcaataaagacactggaacaactggagagccatatggaaaagtgaaccttgaccttcatctcatatcacacacaaaaattgagagggttatagactgaaatattaaagctaaaaccataaagcctccagaaaaaaaatatgacaaaattgccacgaccttaggataggcaaggattttttagggtacaaaaggcataaatcataaaataaataaataaataaataaataaataaataaataaataaataaaagaaaatacattggactatatagaaatttctaaaactctgcccatcacaaaaatgaaaaggcaagttatatatagtcaccaaacagaacatagccacaaggtccatccagaggagaacaaattaaaagtttgtgttatattcacccaacagaatattccacagtaacgaaaatgaacaaaccacaactacatgtaacatcatgaaaataatccaaatataatgacaagtgaaagaaacagacactaaaaagttcatactacataatttcattcctaaaagttcaaaaccaagtaaaatgaatcaataggcccaaaagtcagaatagtggccacttcttcattgtattagtgattgagatggggcacgagcaagaattaggaggctggcaacatcctctattttgatctggggtggtattacacaagtgtgttcactttgaaaacatccatcatgttgtatacttacaatttgtgtccttttcaatattaaatatatttccaaggaaacgttttccagaaaacagcaagaatacagaggatttgaacaagacaactaacaaactcatcataatggaaacataaaatactctacccaacaactgcagaaaacacattcatttcaagcatgtacagaatactttttaaaaagtgaccatatcctcagccaaggatccacaaatacagcctgcagggcctaattccaacctggcacctacttgtgtatggcctgcaagctaagaatgctttttactttgtaaacagttggaaaaaaattaaaagagtattttactatgtgaaaattatgagatctaaatttcagttcataaataaattttaatggaacacagccacacttatccacttacacattttctttttttggagacagagtctcactctgttgcttaggctagagtgcagtggctcaatcttggctcacagcaacctccgcctccccggttcaagcaattctagtgcctcagcctcccaagtagctcagactataggcctgtgccaccaagcccagctaatttttttgtacttttagtagagacggggtttcaccatgttggcctggctggtctcgacttcctggcctcaagtgatccatgcacctcagcctcccacagtgctgggataataggcatgagccactgtgcccggcccacttacacattttctatggctacttttgcacaataatgacacagttatttagttgtgacagacccaaggcctaaaatatttactatctggccctttacaaaaaatgtttgctggcctctcttctaggttataaagcaaatctcaataaatttctaggggtggaaattttacaatccatattctgtgcctaaaaagctattgacaacaaacaacaacaaaaggataattggcacaaacctctatgtttagaaattaagaaatacacttctaaataactcatgggtcaacaaaatattgaaatggaaatttagcaatatgttaagctaactgataaaataagactagtagatattataacttataccttatagcagtacttacagggaccgtgtagaatgaaatgctcatattagaaagaaataaagactgcaacataatgagataggcacccatctcaagaagtactgaaaaaccaaaagaatcaaacaaattcaaagaaagtagaaggaaagaactaataaagataaaagtcatcatttaaaaatagaaaacaaacatacaataaaaaggagaaccaagatcgacagttagttctttaaggaaccataaagaaaaaaaaaaaatcatgtcctttgcagcaacatggatgcagctggaggccattatcctaagcaaattaacataggaacagaaaaccaaataccgcatgttctcacttataagtgggagctaaacattgagtactcatggacataaagataacaacaaaaattgtataaaaagatggcaacaacagaaactgggaactaccagaagggggagggaggggagcaagggtcgaaaaattaactattgggtagttagtactaagctcagtacctgggtgacaggaccattcataccccaaacctcagcatcatgcaatatacccaggtaacaaacctgcacatgtactcctggaatctaaaataaaagttgaaaaaaaaaagttcgttctttgaaaaaagtctaatacaattgacaggtctttggcaaggtgaatcaagaaaaaaaaagcacaactaaataatattagaaacaaaaaggaatccaactatagatacttagaaaatatacgtagctttatgcctataaatttgaaagtttagatgaaatggccaaatgagaaaaaaaatacaatttagcaaacacagacacaagatgatatataaaagctataattctatgagctttaaagtagatgaatcatagtagaaaaaaacattctaacaaggaaaagccagctcagaagccttcactggcaaattctataaaatcttcgaataaccatattcaaaataataaaattcaaataaaatcttcgaaagaacaaataactattattttggagaaacttccatagtataggaaaacagaaaatatactcattttattaggctagtacaatcttaataccaaaatgaggggccaatctcacttatgaacatgcatacaaaaaccctaacaaaatatcagcaagccaattccataatgtgcaaaaataacaatatcatgaccaagtcgggtatatcccaagaatacaattttcagtaaaaatcagtctgtatacaaccacattaatagattgaatgagaaaagtcaggtaatcacctcaaaagacatttaaacaagtgtttaataaaatccaaaatccagttaaggaaaaaattcttagcaatcctggaatagaagggatcttccttaatctgttctagaatacctacagaattccagagcaaccactaaatggtgaaacattgagaacttgatgtgggagactgtgaaggagaaaagaaatgtccccctacatcacatctaccaacatttgcactggagatccttgccaatacagtaatgcaagacacaaatagaggactatgaattagaaaggaagaaaaactgtcatttttttagatggtataactgtactcacagaatctccaacataatctatggcaaatggtcagaattagtaagagtgtttatcaaagtcaatggatacagaatacattcaccaaaaatccaaatgcattcctctccaccagcaacaaatggttagaaaaggaaatattatttacaacagcataaaaatataaaatagatctaacaaggaaagtataaagaaagttacaaaactttattcagagatgttagtttaaataaatgaaatgatagatgtgttcttggactagaagactcaatattgttgtgactttccttcctagactgacctatggatttaatgcatggcatgtatgtatcttgactagctgattctaagacatttgtagaaatgaaattggctaaaaaaagccaaagaagaactgggtagggacttgccttacagcaagatatatcccaacctgtggtaagaaatacagtatgagtaaggcacacgggaccagtggagttacaggagggcctacccacacagcctcctgcctgtttgatgactgctgaaaatcattcaccaagctaagtgggatatattaccccatgagttggggatgctgacccataaggtatggtatgtccttttttcctatccctatgatgatagtctctgactttagttttagtacttaaggagtactttagtacttaagtacttcctagaagaagatacagtgttctcagtgggaagaggaaactgatggtcaggtattttaggctccacagaccactggacactgaggcagtaaaggaggctccaggatagacagggtgagtggtcctgccagggaaaacagtgctgctgctgtacaaagcggatgcggaagggttctcatggagcactcactcctgatcccatgctcaatggtaaatttaatggaagacaacatcaagtatcagtcctaatcagaaccttatagcagtatttcatcctgctgagcatgtatatttcacaaccacctaaagtttctgagtgactcataagtgccctctcctaacatgatgaccaaagcctggggattaataagattttccatgactgctgacaaactggatttccttaccacctgcagattaggagctgcttgtggagcccctatcatgtgttccttgactaaagaagtacagtgctcaggggaggcacacacctagaaggtgcagcccaaattaatttctttctcaggtttgggtccagatgaagacacttcatatccagggactcttcttggcaagatactgtgaaagcaaagagagccttttgcagcaaagtgataacgctgaagtccacgtggcaacactagccagcatgccagcacaaggaagtgcccagttgttggagcaaagacaaaaaagaatccttaggacacagaaaatgatctgaaatacccatttgatttgtggggatggggattaatctttcaaggatgcaatgcagacatcttgatggtccaaagcagggcaatgaacaactgaactctgttccaattcctcacagataacctccagcctccaggattggaatattgccatggatgggcctaccgagaggcaggccacattgaaaatgacaaatgaagaatgtgcgtggcttaacttacccagtttggtcagttattcattctgctaaaaaactgcaagtattgtgttcataacaatgatatggctgtgatttctgtgtccagatttttggcactgcctttatcatgcaagaagtgggtaacttaatacaaaggtctagaattcaaatttctccttgacttcacacatatacctataatgtgaacacaggatgtgtacacagaatataaaaagcatctgcatacaggtgtgaaaactgatacctctctactcttaaagagattcagtctactgggatttaggatgctggacttggtgccagaatcaagtactcttggataaattctttatgctcttatcaactacatacatatttggagcacaagggcagtgttgtctgccctgtgggcctcacagagtgactaaaaggttcaaatgccctaccaaccccgaaagcgtgttgcaaatagtactgtcctaatgagaggcaaggtaaaaaaaaaccaaacaattttgagatatatgtaaaaaccttaagagaaatgtaaggtatatttctgagaaacagaatttttattttcctacattcctatctctgtataatataaatacattctctaaaataccagaagatagcttttgggaaaaatgaatactcagaagactctaaaactttgtctgaaaattctaaagactacagtgaatctttctgtgtcaaaaggggcagagatttcatgtaccatctgtttatttgcatcatttgatcaaagttctgttaagggctgtgggggaatacagatatgaacaagtcgaggctctgaactgtaggtagtttgcagaagaggtaaaacaatgtattcaagaaggcaaaagggaaaaaaagctttagggtggacgcagataaaatattctgaagctacagagagttcttttctagctgagagaagccatggaagtcttcatgtaggaagtggtcatgacagtgggtgttggcagagattcacggtgggaagagcggagcactccagacaaatggtaaaaataggaatgaaaagatgaggtgggtctggctctcttttctagcgcagggttccccaaagtgcactttaagagatactaatttagctgagtgctagctggtttgtatgaatgctgtgcctacagttaatgattaaagtattacagataaataaacagaaagactgtggacagaacatggcaaaggactgcacagagctcctgagggattcctgagagcaaagtgaagtcagaggtagggccacaaaaggaagtgaggcaggcatagaagcctagactggatttgagaaggatggaaagctctggaataggtatgtacggaaatgcatacagataagagaaaaggctgaagaacaggtatgggaagccagatgatatgggacttgatgaaatgccctgcagaaattaccagcttgctctcaagactctgcactgctgtacttgcctactcctgctcatctacccacatcatgtcctggtcatccaaatgaaagcaacacagagcaccaggtaagtttcccatcttttacttaatggaaaggctgagctgaaggtacattcactgtgtgtgtcagtaggagataagatctggtgggtggtgagaattggaaaggctgcagatctgttgggtgttcctcacaagttaggtggccagaaaccaaaatggtaaagtcaggtaggaaagagtacatgtttttatacgtggagagaaataccactgcccatcaaagaatgatggaaagaaagggcctgtgaagtcaatagtaattgcaatcatgatcacaatctctaaaacagatcaatgtaactggtagggaatattgcaacagtgaattacaaaataattttaggttaagaagccaataagaaaagaaactgttaaagtttctacacacatgagagaatgggcaagtggagggttgccagtgggttgagcagaccagagctgctttccatgtaagtgcctggccaaggacagtcgccctgagaagcttggccccagctgctccacaggtaaaatttcctcatcactaaggcatcaggaccatccatcaaggctcaatctgtacgacacctgtggaacctcatactgcagggcaggtcttctcttggtgatctgccaataacaaagcactgacctcatgcatcagggaaaccatgtgcaaccccctaaatcctgtgtacagacttaggaaacagaacttcttgagggcatttcattagaactacaagcaacatgtttttcccacatttctaaccagatcccttaagtaaatctcagacaatcaagaagttctaacgaataatgagagaatcaagtgccagacaggaaataatgaaggataaaaatgagaggctaaaaggggaaaaaaagtggtttctggatattcagagagagctatacggaccttgagctgatcttgtactctagtgatgctggtgcacaaacacaagggtagggacgctatcaggggtgtcctgcataaaggtcagaacagacaacctaaaatgcttccttcacctctgagatctaggattcaaggatctgacacagtttccccctctgggaaattcacagttccacagggattatgaattaagagggtgtgtttgtacttgtgcatttatgcttgagatgtcaaagtgggcaacagataaatctgctaagatattgtaccaaaagacagtaattttcccgttgggaaaaacaatagtagtcacattatttaccagaaacaccaaggagtccatgcactgaacattttataaacattttatgaaaagtaaaatgtgttcaatcctaaatgtcttcttgtgtgttctatggttcagggtgggatgtgggaaggggaaggccatgcaccaccctccaggaacacataactccatggaactccatggagcaccagcaagcagcactctctgaggagaggctgctcaggaaatggttcattgggcttggactagtttcttgaaggtgggaaaagactgatttatattctattttgcagagcctgagccagacacggaaagggatttccaaatagtaagaaagtcctcttagggaacaatagggcatctccatgaatatattttaaagatggttcatcacttaattgggcctgtaagtgattctcctttgatgcctttggagtcaatgattcttagtgattagagatgaaaataatatacataatagatattttttgattataagattaagataaaataacaaaagaatcatagacaaggggtttaaaagcccaggaacatttcatttttgatgatgagcccaatgactgtgatccctaattactgaacctggttctgatctcagtgctcaatgtacagtatgtaattctcacaacaaccccatgaggccagcactttatccctacttcatggaggaagagatgaaggctagaggggctaaccgatttgctgtagcttaagcttgtgcaacccatggcctgtgggccacatgcggccctggatgactttgaatgtggcccaacacaaattcggaactttcttaaaacattatgagatttttttttttttttgcaattttttttaaggtcattagctattattagtgttagtgtattttatgtgtggcccaagataattctttttccaatgtggcccttgggatgcaaaagattggacaaccctgctctagttcatgatttgggccaactcctcactgtggccttgcaggttctgctatgtaatgtcccctgtacccctgataattttccctgctctgatgttagctccatctgatattaatatagttattccagctttctctgattagtgtgagcatggtatatctttctccacccctttacttttaatctgtgtcttcacatttaaagtgggtctcctgtagacaacataaatagttgggtcttggcttctttggcacccactctgacagtctcttttaactgatatatttaagacgactgacatgtattttattcattgtccttattgttttcttttttggtcttccactcatttgctgccttctctagttttaagtgagaattttatatgagtccatttttttcctctctcggcatattataattcttttaaaaacattttattggtggttgccctgagtatgaaaatacatttataactaacccaaatccactttcaaataacactatactgcttcacagatagtggaagttccttataagagagtattcccaattcctccctcctatccttataacattgctatcatttattattcatccatatgctataagcatgaaatacttgttgctattactatctggaacatattgttatctgttagatcaattaagaataagaaaagggctgggtgtggtggctcatgcctgtaatcccagcactttgggaggccagggtgagcagatcacttgagcccaggagttcaagaccagcctgggcatcatggcaaaaccctgtctctagaaaaaacacaaaattagccaggcatggtggtgtgtgcctgtagtcccagctatccaggaagccgaggtaggaggatcacctgagcctggggagatccaggttgcagtgagccatgatcatgccactatattccagcctggacaacagactgacagtctgtttcaaaaaaagaataaaaaaaacagatttcattttacttatatttcttccttctctaaagcttttcccttctttaagtgggtccatctttatgacttctataatttttttttttttttatgatgaaggaaaggcaaggcaggtctactaatcacacattccctcaacttttgtctgagaaggtctttctccttcacttttgaaggataatttctctggatacagaattctaggttggtagttttttgtttttgttttttcctttcaacacaataaatatattatgccactctcttcttgatcgctcagtttctgaagagaagccctatttattacccttgctcttctgcagctactggtgccagcataggagccctctggctcctttcaagattttctcttcttttttggtttcctgtgctttgtatgtgtctaggtatagacattttgatatttattctgcttggtgttcctggtgcttcctggatctgtcattaattttgaaaaattctcagccatgacaatttccaatatttcttctcctttctcttccttgtattctcattacatgttgttacatcttttgtgattgtcacacaggtcttggaagttctgttcagatgtttttcaaccttttctcccctctgcattccagtttcacggtttctactgacacatccacaggctcacaattcctctccttggccatgcccagtttactcatgagcccatccggcattctttgtttctgtcatagggtttttggtttctagcatttcattttaattatttcttggagtgcctatctctctacttacattagccatctcttcttatatgttgtccactttttccattagtatccttagcatattaatcagtaattttaaattgtcaatctgattattctaaaatctctgccatatttgagtccggttttgatgcctgctctgtctcttagaattgtttattttgccttttagtgggccttgtactttttgttgaaagctggatatgatgtattgggtaaaatgaactgaagtaatcaggcctcaaatgtggggttttatgtttaactggctaacaggccgtgcttcttgttttctatagctgtagatgtcagaggttaaaatttctttgaatgaccttgctgttatcacccatgttatttgtaggcttttttacataacttttcttaaataagatctgggatgtgcagttctttcagctgtactccctgttactatacaaaagccctcctgatatcgtagttagatatggagaagaggaagcattctatagtcctaggatttagtctcagtctttcagtgagcctgtgcccctggactgtgaccttcaaaagtgcttttcagttttgttttcttgtctccttccaattccaacttagatgaggtaggagactagaaggcgttggtattaagtgtttccgttcccccaggccagacaggctgtgtgaaaatagtttctcttggctgggcacagtagctcatacctgtaatatcagcactttgggaggctgaggtgagtggatcacttgagttcaggagtttgagaccagcctgggccacacagtgaaatcccatttctccaaaaaaaaatacaaaacttagccaggcgtggtggcatacgcctttagtcccagctactcaggaggctgaggtgcgaggattgcttgagccctggaggcagaggttgcagtgagctgagatcgtgccactgcactctagcctgggtgacagagccagactcggtctcgaaaaaaaaaaaaaaaaagtttttcttgagggcagactttgttaagaacaaaatactttgggtatatagtcatacctaggtatatgagggggactggttccaaaaccaatgccccacccctgtgcatgccaaaatccaagcatacttaattcccacaattggcccacaaataccaaaagtcagccctccatttacatgggtttcgtctcccacaaatactgtatattttccatctgtgtttggttgaaaaaaatccatgtgtaggtggacccacacagttcaaacccatgttgctgaaaggtcaactgtatttccaaatgactgctttctccctttttctgccaaagaggggattttcctccagtttttactgtgagaacctggtaggtatcctagaggtagaactcacaaaagtgtggaggattgtcagccagccccacttgactctatttaactctcagatttgcccacactaagcctcctgcaattggtgaattacaatttaagtattcctactgtggtattggtttcccagaggtttctgctcctgggcttctgttctgataaggtgtgcttctctgtatctgcctgtctatctctctaactttagggacaggggtttgcctggtcatttcaattctctgatgaatctaagaactgtttgattatcagttaactgctgattatcagctcgttctttttcttgctgtgaggatggcagtgatgactatcaagctccctacatactgactggaaaccagatgtctccctatctgaattaaagcagcctccttcctgcccattctatcactctgctttactttctttgaaatacccattgctataagagtctcagctcaaccatttatttacttatttactggccttctcccttactaaaatttagattccaggagagtgggacccccagcccttgacacagtacctggcatgaagcagcctcaactgatagatgtttcctgcttgactgaatgaagcactcctgttcccaagggactaattgctgggcattaaccaaatctgttgctcctttcgacatttctagaataagatctcttgtgaccatctgtcttttgcttcatggagatgcatgaaaggccaggggaagggtgacgggagtggccttgggatcctgagtagccttcttccactgccatagttttgtttggtgggtttgaagaaaatgttccacaattaaaacataaagatttaaaaactgcaaagattgggcaaagctattttgatatcagcgtctacagcacagaggaagcagtcggacctatgagaattcaaatgggagcaaagaaggaggagactgttagttctactagtgatgactaataatgagctttccctctacgacagtactggtagaaaacacaggcgtttcagttccaaacaggaaaattaagaatctactcatagtctaagatcattcgtgttgccaggttcaaataagaaataagaaaataagaaagaataaccctttcttccttctatctttagtaacaccacacttcaaagagtttatttaaaaaatattctatataaaaaaataagtgtacttcctcttatggcttatactaaaagcagtccagtaatcagtgaggtggagttgtaatgaaagtattcatgaaaaaaaaaaaaagagcaaaaaacccaacaacaacaaactaatacatttcaagtatagcatagaaaatactactgtaaagataaattatctgatttggggcaatgagcgctctttccttttcacagaaaagttctgtgtgctctggacacccatcctccttgctgggctgagtggctgacattgtgtgcacctgtgtgcaggaacctaggcagtcgcatgccaaggggtctggggagtgtgctgtctcttgagccaaaaggcccttcctactgagtagctcagaggcagagaatgagagctgccttgctttcttacattaccatttgccatttggtatgcatttacacaggctggctctggctggccaaaggagagaagataaagcaaataagaagaagatgtatatgcaaagaccaacttaaaaaaggggaaacaacgtcaacttctgaggaaaatcagttgagaagaaattctcaaaagccaaattgttgtgaaagataaaacagcagctaagagctaataatagtaggctatagattttcttccatctgtatcaaggcttattgtataaataaacgttctttagtattcttcagcaactgctcgtgggtgactcagtctttcaaaaaccggacaaaaggaataatacaaatcccctgtatctagggaattcctctaattagaagtggcaatgaattagagaagaaatttgattttaatttaacatctgcaaatgacagatgccttttcacatagttctcaatgtcattcctttactaaaaataatgctaataacaataataataaattatccaaacagaacataacatagtaatccatttaataacctattttagtacattctggttgtttggtattttcaatgatcttttctaaataaataattctttgtatattcaaaggttaacaatttattttccctgagaagttcccagagcattttaaagggcatgatttaatcttaaacaggttagttggctgtgattgggataaatatttaagaaaactgcacatataaaatgaaaagaaagaaatttacataaccatgttgcaaagtcaaacactctccctataccgtgaggccacactagtaagcttaaaagacttcctttcaaactcagtgccaatcctaggctcctctcagcctcccatgtgcaaatgctcttgtaacttctggcacaacagccttttcccagcatttctgggcacctgctccaggtacaggtcctgggctagatgtcaccctgaagagggatgcatgaacacacatgaacacacacacacacacacacacacacacacacactcacactcactcactcacaatagctgctgaaccttcaagagagccagcgactacttccatgacgctctggggatagtcaggacaacttaaggaaaggtacgggcagctaggaacaagaggatccaaaaaaaaaaaggcatttagaatccctgtaaggactacagagaagccttggttctcaaccagcatttcacagctgaggaagctaagattcaaagaaacggaaagatctgcccaagacacctaccatcttgtggtaggcttagaactggaactctggtgtcccatctcctgtcttactacttcccctcctacgcttttcacaaatcactgaatcactatcatttttttctccatgctcgtatgtaccagggctgagtaagtagagttcagaggacattagcatattttccatttacaaaagggacactctggttgaggtgaagaggaggacacttcaccaaaacttcctcttgtctcaactgctcctgctcaaggctgcttctgaacacctaccctctggtcaactggtcaccagccagtcactactatgcctggaaataaacatgcccaaaccactaaaacttaccttcgcaaatttctgaaggcaaacactttgaacaccaatattactttccagatactgaaagagagggaaagcagcacgggtactcactgcagtgtggaagttctatgaatcacttttctgaagaacaactctggcattttaacaaaccccttgaatcactcacattctgctctatatgcaagtctttccttgactgctgacttaataataaaagctggaaaaaacataagtctaacaataacacatttcttttctgtgaccaaagaatgattgtgtcaatgtttatggagatggacttattttgaaagtaatttaacaatggaatgatgctgctaagcacactgattttttttttttaaatgaaaaaaagaagttcaatacaaagctcaagaagtgaacaggcccactcagatgagagggttttatgcgttcacacaagcacacccacacttcttcaacataccatttcacaaatgctgtgtattattaagaggaggcggattctgccaggcacataatttgtatatttaagggaggtgtatggaatgaaaaagcgaaatatgttaaatttcaaaggacttggaagcaatgctgcctgtaagcttgtattacaaatagccctacattattacatacgctattaatgaggccgagtgaatgaaagtacaatttgaatatgcatgactctacccaatgagcaagacttttgtgtactgatgaggtttttttttctcccaaaaaaggattaaaattattcttagaggagtatggctgcccagagaacagtaaaataaatgtacttagaccacagagtcatactatactcagatgaaatacacaggtgctaaaagaatgcctttgactctacctacaattttggaaacatgcatatcctgtccttcaaaaggaatattccttaacttcaagcagctgcgtcattacaatttctaagaaaaaaatacggattttggtggagatccctaaaagtaggcaaggttaaataaaccttttgagtacaaagccttcccttccacagtaaggagcactagttaaaaggctggggaatgggtaaattattgtaccaaatggctgagaattaatctctgctgactagctgtaatctaacgaggcgtctgtgtcccagggagcccgcagcatgtccctggcggtatgtgcagtgtgtcgagtctgcgtggcaccctttgtcctcgctcacaggcggcctttcccctcattgtccgtaatatcctcatgcatctgggacgcgtggaatgcattcatactaacagacttaccattgttttctctcagaagctttgttgagcaaagactgcatcacggttactgataattatattgcttaattaatcaagacaaaaaaaatttgcaaatcattgcctggttgccaagcagggagataaaaaatgacaacaatacaagctgaagcaatataacaaaagtaacagctatctgatcagaaattcttatataatgaagctattaatgctaaatcggttaatgttaacattgctccaggtgtctctacttagatgcaaacaaaaaggctaacattatggatataaaaggccaaatgttgccatggattctgtaacctgatagagaggacagccttttcatttgattagggaatgcaatttaaataccagggactgaagccaaacaaacagactttccctccgcaagcctcttgcattcaccctggggtcagtggttggtgaacaaaaggtcagccacacttgccctggaaatgtctggattaattttattacattgtaatggtttgtactttaaatgtaaggataatactaaatttccagttggccattattctcttcttccctttaggctttttgaattaaaatattaagaaagcgatttgctcaattcatcttgtcagaatttatagccaaattcattaaatgtgcaaacattttataagaaagtttacaaggtatgttaataattatattcatgcattataagtgtactatctttttaaaaaatcaaaaaaatcacttttgattctataaagtgaattaaaatggcttgcatgttttttacttaaaaataaaggtgacatttttaggacattaaatgacattttagaagcccatgttgaaaatgagctaataaagccaattaatccatactaaatattaaagaaacacatttcctctttttgaaagctataagacactaaattcactggttctcttatattaaaattttcagtttaattctttaaagtagtgctcttcatggacaaatacaaatgttagcactaagagccattttcatacacaaaactgaaaacttcacgcacatggagatcagaataaaaaatgatgcaaatatttaatatgaagtgacttttggcatctgcgttccctcaatagaaaagagggttccctttatgtcaggctttgcaacagccagaatgggacttttatgaattcaggagttgacccacaatgcatctattctgagaataataagcatgttaaacttggaattcattaagtattctctctccatagtagtaataacaaaaaacaacagcaacaataataataataatagctaacacttaagtagcttttactctggaccaggcactgtttgaagcactttctatttattagctcatttaatcctcacaactttaaccctttagattaggtcataaatcccaatatgaacaataaatctgttgcctattatttcaaagctttaaaagagagttttcagaagggtaactttcagctccttcaggagaacaacttgaaatgaaaatgaagattatacatactatcaagctgaaaaacacaatgtcattcctcttgagggatggcttaatatgctaatgtttaatttaagaactttaaaaacgcccttctattagtaattctaaaacaaaaacaagtcgctacataaagcatggctaaaataccactaaaggtatgacaaggatcgaaactgcagccaatttagtacacagcacacagatcattggattgttccagctcttcccatgatcaataccaattgacatggctgaattgattctgcagcaaggtgctccaattgttgaaactcatcacgtgggccgtgctccagagtcccggcctcttcgtggacatgcctgcaattctgcaggattgaccccattagcacagtcagaggcttggcaagtgcccgacaccaggcaaggctggattccatacccacggttctccacaaaatgctagatgtgatatggggttccttcaactcttattattaatcaacataaccaaaatttcaagatacaatttttcaaaagtacaaaatttagaaaacttaaaacatttacaaaataataaatttgacattataatttccaaagaggcctagtaatacaataatacaattttgtgctcatgatgaaaaattctttgaaaatcccaattcatatttaattcctataaagcatgcataattcagatatatgtaagacattcaacaactggatgagagtcccctttaacatatttgtatcactgattttcaatgacaatgaatcacatggcaaatgctttatgagtcagtacaacaatgcaatgaaaacgtacctcaggtttcttcgttatcgcgatgaagaacatgtgattcttcattgggtaaataatgattgaaacatctccaaaggcagttgggataatacccctgcggtagtctctggagtgttcagaccagacgatatggacctcgtcattccccaagtgacgaagctgcaacagcaaattgactgtttattaatcagggtgataacagcagtttatgaggggtcatggcttacaaattgaattataaaactcaaaggccaaaaaaatttcactaccaaaaaaggctacaacattgatgttcttctgtgaggattttaaaaagcacaagtgcataaaaacacagcctgtcttcttaatgtgttggtaccaagataaggcatgctagcttcgcaggcacattacagctggatggggctgaggcctttgtaagaatttattttctaatggaattttactcctgcgtcagagtcctgtgctttatattgctgaatatgtttctaaacaattaacaacacgtgtcttttattccacattgcagttgtgctttataagattctcaattcaatggttattatgaaaataagaatatgaacataagagaacataagccactacaacacaattgttaccaaatgtataagaaactagatttgtgacaaacctttaagaaaaggacgtataaaattacctttgcttaggaaatgaataactactgcttaagtctgataagaacactcctacctagcatttaaggagtgcttactgtatagaagacatgttcacacatactatctcatttaatcttcccactaactctctgaggtagatgacatcatcttcatcttactgtacaaaaaagaaatgggcgctcaggaaggtgaaggcaccacctacccgaggatgcatgagtagcagtggcagagtgggcccgggacatgcactggggcttccaattcagggccatttccactgtttcaaagctacctaagcctgcacccaaagttactttactgtcattgcttagtagtgtagcccacttgttttatcatcttatacacaaagaggctgtaaagaacaaaaacaaatcacagactcctggcgtctttgaggaggccttactagaaagatctccaaaacaagaccccttgagagttctttcaggcccaggctctgtcaggtgtaagaacacccttgatcaatctcctgcacgatgaccgtaccatctcaagctggagaaagctgcacacgaaatcatttaagtgacaaagaatcaaagtgtgactaaaagaaactagattatgaagattaaaatgttggccaaaattgaagttctgaaaccacaaaagctggtaaggccctctgacatcttctgggaatttgagattctcgttctctcacgtggaactgcagaaggatgctctctggcaccatgaacaattatttcttgcttccttatctaacagatgaacattaaaaatgactaaattcagaagcagtttaataaaatagagatgtgtcaaatttaacatttttagttttgtcttaaagtattttttaaaaaggtgttctggaatactatgtatttaaaacgtgttagcataaatacagttttctttagactatttgaccacaaaaagaaaatctgaggtgaccccaacatagcctcttttctgtttataaggttacaaaaggaagctcatctgttgcaatgcctgtttattcttcactctctcatacttctgggaatgactgtacaggccaattatttaaaaagtgacctgtgcctataccattgtacctatactgaagggtgcacgattcaactgtgtttgaatgtgggctctgggacaaatgcaactgcgggtgctgagcacaagtcacgatgatccagaacaatttaatggcatctccgactttctaatggcaaaattacccagtacatcatttttttccttcctccttcccacataaaagtaaaagaatagcaggcaaaatgtatagccaaccccttacatagttttaaacaaaatacaaccctgggcctcctagtagtgctgaacatctctttatatttctccattcctatatttgctacagcttttttctttttcctttttaataaaacatgcaaagacattacaatacactcctaaaattcagtccttttgaagtgaaaacacggtagccagcatcaccaagaacctaatataggtatgttttcggggaaatatgaatagtatctaactggaactgtaggaggaattgagacctgcagaaagtaattgtgagaactggggctgtcctagagttcacacagccctcaccctgcaaagacagccagcttcagggtggctctgggtcccttggtataatgcttgcacaaatgtctgaatggaaacactcacctactaaacacccctcaaacgtgctgccaccacccgatgttggtgctctagtatctgtgatagctccttttgatccacaagtattagttgcaaaacattgactgtgaggtaataccgtgattattgaagttttgtagttactttcccatttcaaattgggttactcaattacataacctaagtaagtatctcttaattttacttgcatctgtatactcagaactacagcgagggaggttagtttcacactaacagacccattctcccagtgtggcaattctgtaattaaggaagagcaatttttgtgtggtaatgatatgatattcatcttctcatagctgctttcagtggcacgtgactcagacttctggatatgtcacagtttaattagctaaatcacaaaactaaaagctaaggccatgggagcaatcggctgataaatctggagcaaagggcaaaatatgccttcttttgcctataagaaaacaggtaggtaaaataaataaaattcatctgggcaaactgtcaaccatgtcagaacatacggaatactctggatggctcaaagtgttgcccaatttaaagaagagtccatcattgacacatcattttgtgagtattgaagaactgggattagaggccctcaaattagaaacccatcagtgagttcggtgagtgcacacaagtcaagttgatctggttcctgtgtaactggggaagaatgatgagtctccttctggaatggagccggtgtttatgttagctactccttcaactgcacaacaggctccacaatggctggatacttatcaggctcagaacaaatgctcagattttaagtcttaagaaatcaatcccggacccacaacttttcatcctaacagagttttaaagtccctttgcctaagccattctgtctgttgctgctgccaggctgcacgccactggtgacaccggtcatggtacacacctaataggctgacctcctttctcgactaattgcattacatcgccagctggctccagaaggagtcgtctgtttgattgaagaattcctgctcctcagtgggcccggctgctacttttactaagtaacagtcaggcctgacatccccattgttcagctgacagtgtgcccatcctaaaatctaagttttatttgtaaattaaccaagaaacttcctgccagaacagcgctgcctggagactgataatgtgggcctttcatcccttttcactcgtactgtatcactgccaatttgttttttatgtggctggccagcctgaggctataaaagccttgtaagacataagtgcaattatagtcctggagtcaaatgaattggacaaatccaatagcacagctctgtccccactctgcaaacccctacagcagttagattagctgtgaaaaatctaatctagctagagctaacaaatttctgcagtgaaggatcaagagttcagtatggggttgcaactggattgcagaattgaaaaagtccccccatgatgggggcagaagagagcatgaatcactttagaattttgcagctcatttttaagctgttagggacaatttagttagaataagacaaggaactgtgggctgctgttactgtgactgatttttagtctagctgtgagacatctgataaagagagtttatcactaatgatgctaaaccttacagctgcaaaaggtatcagctgaattttgattattacagtagggaatcattcaaccaggccaagtcttagaacattatttacagcttggcattttatcaagaaaacatgtcttttctcaaaaaagaaaaaacagtcctactttacttaagaaataatttaaaaaatattttatatataaattttatcttttaacaaaataattctcagtcataagaaaattatagaatatggtgacacatttgcaaagcagaaacaatttacaatgtactgcaaataaaaaagatgtgtgagcccagcttaggatcctggtaagctacactagagtctgagatcctggtgaattcttggagggcagagttccctttgctgagagctctacagccaggggcagccatcaaaacccaacactgaggcagctcctccaagacgtgtgggaaccagcacgtggtcagcgcttctggctgtagtactgccacccccaggaggtcattatagcatgctggggcaggagagggaaaggctgctgagtttttgaacgcaaattgtactttctacatctgagacacttgatcactacggaagttgtctgtaattgggccatgacttgagttctgatgtttcacatgcactgctgcccatcatatacaggcacacctcagagatattataggcttggtttcagacatatccgcaataggttttttagatattgcaaatacagatattgcaataaagcaaatcatataaacttttgtgtgcactgggaaagcagtgtgcataaaacttatgtttactatagtctattaaatgtgcaatagcattatttcttaccatatgtatattaataaaaaaattttattgctaaaaaatgctaatgattatctgagccttcagtgagttgtagtctttttttgctggtacagggttttgccttgatgttgttggttgctgattgatcagggtggcagttgctgaaggctggggtggctgtggcaatttcttaaggtaagataatgaaattgccacattgattgactcttcctttcatgaaagatttctctgtagcatgtgatggtgtctgacagcattttgcccacagtagaacttcttttgaaattggagtaatattttcaaaccctgtcactgctttaccaattaaatttatggaatattctaaatcttttgttgtaatttcaacaatgttcatagcatcatcactgagaacagattccttctcaagaaacccactttctttgcttatccataagaagcaacttttcatccagtcaaattttatcatgacattgcagtaattcagctacatcttcagtctccacttctaattctagttctcttgctatttctgctaaatgtgcagtgacttccttcactgaagtcttgaatcttttaaagtcatccatgagggtgggactctatccaaactcctgtgaatcttgatatcttgatctgttcccatgaatcacgaatgttcctaatggcatctagaatggtgaatccattccagaaggttttcaatggtctttgccagatccatcagagaactcactccctatgacagccatagccttatgaaagttcttaaatagtaagacttgaaagttgaaattactccttgatctgtgggttgcagaatatggatattgtgttagcaggaatgaaaaacaacactacatctccttcagagctcttgagtgatgaggtacattgtcaatgagcagtaatactctgaaataaatcttttattctgagtagcaggtctcaacagttggctttaaatcttcagtaagccatgctctaaacagacgtgctgtcatcctggttttgttgttccatttattgagcacaggtagagtagatttagcataatgtttaagggccctagaatttggggaatggtaaatgagcactggcttcaacttaaagtcaccagctgcattagccctaacaagagagtcagactgttcctttgaagctttgaaaccaaacattaacttttcctctctagttatgaaagtggtagatagaaacttcttccaatagaaggctgtttttactacactgaaaatctgttgtttagtgtagccacctccatcagtgatcttagttagatcttccagataagctgcagcttctgcatgagcacttaatgcttcgccttgtgctttcattttatgaagacagcttctttcctcaaacttcatgaaccaacctcggcaagcttcaaacttttcttctgcagcttcctcacctctctcagccttcataaaatttaacagtgtagggccttgctctggattaggctctggcttaagggaatgttgtggctggtttgatctgttcagaccaccaaaactttctccatatcagcaataaggctatttcgttttctttatcattcatgtgttcactggagtagcacttttaatttccttcaaaaacttttcctttatgttcaaaacttgggtaaatatttggttaaagaggtctagcttttgccctatctcagctttcaacatgccttctaatcattcctagcttttgatttcaagtgagagacatccaacttttcctttcacttgaatactttgaggccatcaaggggttattaattggcctaatttcactactattgtgcttagggaataggaaggcccaaggagcggaagatacataggggaacggccggtgggtggagcagtcagaacacaccgaacatgtatgaattaagtttgccatcttataagggcagtttgtggtgccccaaaacaattacgatagcaacatcaaaggtcactgattacagatcaccatatgagataatgataataataatagaaatattgtgaaaattacaaaatgagacagagacacaaatgagcatctgctgttagaaaaatggtgccaatagacttgtttgattaagggttgccacaaatatccaatttgtaaaaaatgtaatacctgtgaagtgtaataaagtgctgcacaatgaaacaaggtatgcctgtacatagtccagacatctgtggctgcagtggtgaaaaagcaaaaccgtacaataaagaaataaagcaggtacagtgaggccaatcggccaatataaagcatctggctaacggggcagggggaaaaaaagaatcaattagaccaatgggcaataatgagggatgatggtcagagacatcttcccaggcaccgtgctaagcaattttataggaattatctcatttacttcactcaacaaccctgtaacataggctgtgtttttaatctcacttaatagatgaaaaactgaggcacaggttgatgaaataactgaatatacctctgatccctggtctgcctgtcaccggagcctggctataaccaccacagtagactccccagtggccagctttggtcagcacgtgaggtgctgccctcagtcccttgcatttatgtggtagggagagagtaaggtggggattctaggttccccacctgctagcaggccaggtgagtgcatatcacagttgctctgagacgttctcctcatctggaagcagatctgattagaggcttccttcccagagttaaatgcctcttcttttaaggcgctcctcacttttaacacagggttgcctgaggcaaacatcctgcaggttggaaagtaaaggccaagttccctgggggaggttcctcaggggtggataaggtttcctttgaattctaaggaaaactggccacaaggcaagttgaagaataaaaggtaaggggcaacagtggggcggctgagcagctgcacacctgcacttatgttgacagatgctgccaaatcgccccgcagcaagcctcagaggggcctgctttcccagagccccaccagtacagggtcatcatattttgtaacctttgacaatctgtgagatcaaaaatgtcattttccatcaggtaatattcacgggagggaagatccaaaagtaataacatttaagacgccttctttccccaaaccttaatctcagggtcgtagagttcagagaaaccatctcagtgtgcgttctacccttgtatttgtctgtcctaggagagcctcacctacaaaccagggcagctaagaatggtgcccgaggagaccccttacctttttggtgagggaatcatctgagtctgacggcattcgagtggaaacatggaaaatcacttccacagttgaggtagcatagtaaggggccgtctgcccggtgctgccattgcgctgaaggccacccatgaacccacagtgggtggagagatccacctgacaaaggtcacaaagaagaaagagtgaggatcaaaaatgagctgctctttcactaagcaggactgtgaattcagaaaaaaaataaattattttcgtttttatatctttctttctgattacaaacaaatgtaatacaaagttagaccagattaaaatgttaaagaaataaaaaacattaaaaatgaaagtgctctacaatcatatcaactgaataaaaccactaccaaacttttggtatataatctctaacttttttcccacctgtatgtataaatgtatgtgtatatatgcatatatgtgtgtgtatacataggttccctattgatggattttgggggtttctgctttttcaaaacagaaagcacactcaaaggagtgtttttctaagatgttgggtcaaaaggtaccaatattaaaaatatttagcaatccttgctaaactgcctttcaaaagggttgaacaaccactttacaccactgccgaaagtttatgagtcataattcaaagttacggcatgagtgttcacttcttagtgcctttatccaaaatttttaacttgtcataaactagtattctttcagtaaaatacctattctaacatatatgaaaaaagaaatagaagaatctcttctgtgccaaatagagtaaacatatactctcaaaactctaattgataatgtatggcttaaaaatatattaaataacaactatattctatgacaaattagaagtagccttactagtgagaacaatgatttactggaagtacagtaactgttagactcaaacctacttgccttcttagtaaggatgtcgttttgactctgatgtactcttaccctgtttccatccctgccttagtccccttgctagcactgagctctcaaaggcacccagagagtttttcagagcacaggtactcaagaaactaataaaaaataaggaaattggccgggcaatcccagcactttgggaggccgaggcaggtgaatcacgaggttaagagatcaagaccatcgtggccaacatggtgaaacaccatctctactaaaaatacaaaaaaaaatcagctgggtgtggcggcgcgtgcctgtagtcccagctacttgggaggctgaggcaggagaattgctggaacccgggaggtggaggttgcagtgagccgagattgtgcgactgcactccagcctggtgaaagagcaagactctgtctaagaaaagacaaaaaaaaaagaaaaaaagaagtaaattattttagatatgttgatttccattttaactactcctaattctttcagattctaggaattttttttttaggtttatgttttttggggaaaggtgtgtatgtgtgtataaatgtatatatgtctgtatgtcagagtaccatttaataaagaaaaaataaactttttcaacatcaatcatcctgaaatctaccttagggaaataggttgatagctaaaccatcatggctattatattatattttcattgcaacttttgacttcatccaactctttcttcatcttttcacccatcaagtcattgacttcttcttcaatctccatactgtggccaaagccattgcttctctgcccacatttgtcttctcttactacaaactgtctatgtctgggagagcccatctgactattcagttctgataaaaagcaaatgaaaaaatattaagaggaaagttaaaggaaaacaaaagttcatgtattaaatactgacaagcaactaacagatgtcaaatccaataaattcttcaattccagaactctatctatgctatatttgaatgcaaaagcacatgtaaaaacttacacaatgtctagtttggacacatctttaaacagtgctggtcaataaacacctactgaatgaaatgcattacctcccatccaagtccagcaacaaagtcttcatatgcttggcttcctctttcattagagaggattgaacacttgtcttcttgaccttcagcaatgtaaaacactgcgattttgtgtgtctcacggctataaatttttaaatttaaaggagttagaattcttatatgtaaaattttacttcactactattaataccaccagcatgacttctaccactgagcttacatttactgagaacctgctagaggtcagtcagtgttctgagatggtctgacacatagtctcatttattcttcaaaaccatgctaaagagatgagtattattatcacctccctagtagaggtggttgaaaggaggcacagaaagtgaaacaaaaagcacatccagcaagctggggatgggaactgtcgcaaggccatctgcttcctgagaccataccctcagacataagatacaccgaccagaaggctggggcacaccatttggtaagttctctgtttttggtaaaaaaatatcttttaaagtatttcaaatacatataaattgtgaatagatctatgtgactgtccatatttaactctacactttaaggctactgggtggctctgtgattggaactataaaatatgccacgattttatgagaaaaagaagatccttccaagcgaacacacttaggtattttcttcatgaaggggtttaccaacttctgtactctgactattctgagggtgcctgacagggtggatagctatttagtggaaccccttttagccatataaacccttcatctgcttgttccaacatagatcttggatactctggtatcaaatcaagcaaaagtgatgtgtactttgaaaaaagaagccctgccattttctcttttgcacatctagcatactgctttgcatatagtaggtgttcagttaagtctctgttacactgagcagatatatggtgatacatttgaatgcattaataataaatttctacaaattataccctggagtaaagcgacaaaatacctgggcctagaccaagcatttggtgatagtttagagatgaaacactgttcttattcaaacggagctttgattacgaatcattcattccctagcccaatcacccaagagttttggtttttttaaagtttcgatgtccacttccagagcggttccaactttctcctttttttgcactacattctgataaatctcataggaataactgtcaagttcttaaatacagaaatattttttctgtcaaatttaatatttaattttttaatatttgtttagtatttcaacattgtaatttgattagatattgtattggtagaactgagttccatattttaacaaattatctaagatttccttctgtgtgagttatttctctacttaataatcagaactaactgattctcaattaaaaagtcatacaaataactggaggaagagagttctctccttttactcagcttattcacttcccctatggtttatatgcaataaacatacttggaagaagaattagaaaatacagaaagaaaagagaagaataaaaatcacttgcagtttcaacggataagcaaagaacatagccgttacaccattttaggatacacttttgcatgcacatatgagaagctactacattctgttttacaacagattttttcacttaaaatatttgtgaacacttttttattgtggtaaaatatacatatcataaaattcaccatttcaaccatttttttagtgtgaacacttttatatcatgtgcttctacaacagaggtttaatgattgtaacaacattccattatattaatatgtcatggcccaaatcttcatttaggttgctttcattttaaaagacattttcacgttatctttaatacatccttaaagataatctttaatgtttttaatcttttcacaatatctttttttgagatagtctcacttcgtcacccaggctggagtgcaatggcgtgatcttggatcactgcaacctccacctcctgtgttccagtgattctcgtgcctcagccgtcccagtagctgggactacaggtgcatgctaccacacaccaccacacctggctaattttttttattatttttagtagagacagggtttcgccatgttggccaggctgatctcaaactcctgatctcaggtgatccacctgccttggcctcccaaagtgttggctttatagggttgagcaccatgcccagccccaatatctctaatatgtccttaaaataaatttagaaaacttgtcctcatgcagcaggaagccctgaaagtgccacaccattcactgccctgagcaacaggcaggggacaccaatggcgtagaatctaactagcctattccaagagctataaaaatttgggcacttggataataacagaaaccataacctatgacctaaaagactgtctctttcaacaaaagtggagaagtatagttattcagtttttatctgaaggtctctctacatatgtaaaaactcctcagcatttaatttttctttgttttatagactttacatacataaaaacagcctcaggtttatctacaatgtttcagtttattctccttaaaaatctaagctgtttccattgcagctgttcctaagtccttgagccctcattaactcaatgtgagagcacaagagagctaagcctgaatgatgggctgaccaatgtgagtgtgaggaaagatgacctttagttgtaaacattcatcaaatttcacattctccaaaatgttagtaccacagagagcctgctaggatgcagaagctgtgtctggccttattaaagccatgcttttgaaatgataattagcaacatcaacagcacttcacatccataagaagcacaccaatgcatgaaggagcaggtaattcagaaacacacatacatgaaattaacaatcttcccttcctcattagaatgcactgttctttcttattaggaatagaccagaatagctcagtttccttgtgctgtcacatgaaaaagccaaagaaaagcatgattttaacatccacctccccatgtagtggcaagaaggcatttacatctaacagggaagcccactgtgatttgtatgtacattcatcatagcactgacaatctagaccatagctgcaagatagcctcaacttttccaaagaacatgttaagaaggaactatacatcaagagcagtgagatacattgatatcagaattaaacagaaatgttctaaatgaaagttgacagacaaggtattttcttacctgctacctgaccaaaatacagggcagtctagatttctcatagctgaagagtcccagacttatttctagtttcttcaaaaagatcttgaaaatacccttcaccataaaataagttgatacccatttgatgtcaagaagacactaaatccaggagttggggttttaagtgaaggttgatcaaggggcaggggactgccactcagctattcaaagccatatttcgttgcaacagtaccccagggagctaattcaattgtacctcatgcaactaaagtgcattaacgctcaacaaattgaccgcaattacatgaaaccaagtattcacttaatactaagaagcctggaataattcagcatacgcttaaaaagctgagtgtggaacccaaatgactgcttatttaatactgaaggaaggagggagagtgtggtgaacccctgagttcttcagaataaatcccttacagaatttccatagagaagttgatctatgttcctctagagaaaaggaatcacaagaagaatcaggaaacagaatacagtgaagggcaaggtgagaaatggcagcttcaggtttttcatttctaatgactttaaaaaattattcaaattcaaatcttttactgtctcacctgataagtcaggaaacaaagacatttaaaatggcaatggagctgcaggcttctggacagagaatggctcctttatccaggtaaaactacaaatgaatattttaattttgtgtttttaaaaaaatgtctgcatatttgatactgaaatatttatcactctttaaggccacctaggaaaaaaggccctcatgtccccttctgcagagggaatcaggtttggaacagccatcctgtcacattcccaagacttggaaacatacacaaaacagttcatgcttcaacatgtatgtagctatatgatgcaataagaggcgctcagtgacctgggagacaggtgggaaagtagaagggtgaagaaaagaaaagaaaaaatgaaaagaaaagaaaacttatgcccttctgattcccacaaaatggtcaatacaaacaaatccatcttaataccatatgcttctgaaggatggaaacaatacatagctgtgagtaagtttaatattattttatctactcagtccttagtgacattaccaaaggacctttctgaaatataatcttccaagtgtttaaaagaaaattccaactggactttgctagttgggtttatatccaattcaagaattcaaaacaccaaagaagaatcacagttgtgaaggtgatatgcaaataatagtgacatgaaccaagagtttgcttgaaaataaaatttaagcatgtgtcactttgggtttcgatcaaaactctaaaataaacaataaaaccatcacaaagccactgaaacacacacaatggtgaaaatgttcattcagcaggctctaactcatcgctgtaagtgcaagcaggagaagctcatgacttagatgagaaacgtgacagtggatgaaggatttaatgaatggaataaagagctctagtaattttctgaaattctaagatatgactttgtcaagataaagcagggctctgttatttcctttcttccttcttacttctcagccagcaactgtaccaccctttaaaaacatatagatcaaaacagatttgaaaatttttgagttaatgagtagtaagaaaaatgtagtgaaaaaatatagtgtgaagagttgaaaaataaaattgaggaaaacaacctgaatttttaatttgagagctgacagaatattagaatattcctacagggaataaaagtggtgttttttttttttagagttttttaaaaaactaaagattaaggaggcagcttattctcttcgaaactttggaacatctgttatgtaccaagtcctatacttattcttgacttagatgatttcggaaacacacattccccaaatcaaacacttttcatggttgtgagctcatctttagaaatgcttctgagacagtatagaacaggggtggatctgagtctggccagctttggagaatgagccttattaacagagagttattaattacaacacactggttttaacctttccaacactatgaagccacaagtacagaatgttagcgccttgatacacaacatggattctgaagtcagactcacttggctttagataatatggtatgagcaaccacgggctgttaaacctaggtaaactttttcttcatcataaggaggtggttgcagagatcaaatgagaataaatttctactggcagccacaaagaaagataatcaaaagtacagattaggtgggagtggtgacctctttttagtgtatcaaacatgaaagtttattccttatagtaaaaaacaccaacggtatggcatgcgcaaatgtcaccagatgctaggttacagaactacccttggatgtctcagtaagtctattcattcctgctgttgtatctgttatccaagaatacccaaagacaaacaggaaaaaagtggtttgatatactttcacataccactggcgggagtccaaatttttcagctctctcaataattttgaatttttcttcaatagatgaaaattcttcctataaagaaaaaaggatggaagaaaaaccatgtgattacagaaccattttgccgcttttcaatcagtaatttaataaaaatacctatcatccatcctctaccacctcactcacaaaagatttgtgatagaaacctacagaatgaactccatcctccttaagacatgcaaaggtataaaaattccatcagcatcccattactacccagtgacacagatggctctttggtgagtatgtgacttacatgcatgtgcctgtgtgactgtgtctgtttccagtgtcagctctgctgtgaatcccttttccctacctctgttcttaaaaactccactccactatcagggtccagctcaaatcctcccctttccacaaagtcttctccattgctctgtacttcccattggatttaatcattactcatgaactcctgtgtcattctatcctttatcagagttgtattaggtctatctcccacatcagacctaaggttagactgtggcttattcacctttgtagttcatttgcttcctgcatgagggcagaaacaataatggacaaagcagtaattaaaacacacacactcagccaggcgcagttgctcacgcctgtaatcccaacactttgggaggccaaggagggtaaatcatgaggtcagtagtttgagaccagcctggcgaacatggtgaaaccccgtctctactaaaaacatcaaaaaagccgggcatggtggcaggtgcctgtaatcccagctactcgggaggatgaggcaggagaattgcttgaacccaggaggcggaggttgccgtgagccgagaccatgccacagcactccagcccgggcaacagagcaagactctgtctcaaaaaacaaaaaacaaacaacaacaacaaccccccctacacacacacacacatacacacacacacacacacacacacacacaaatgtttgatatcctttaaaatatccaacatgtttggaattcaatctgcacaccagtacagcataatttcatttctagctttaatttagtagcagaaaataagctgcaaatgttaaaataaagaaaaatctcccttctcctctcttccccaatcttttcttcttccccaaccacaaactgataaaaagaacaagtacatgaaaataatgataaaataactggaggtctagcttggattgttaccttctgtcccaagaattcattcccaagtcatcaagcaataacctgcagaaataaaagggtcctcggggctccactggggagggctgcccttggctggtgactttcattgcagaatcgaagttatgactctggatatactcatcctcttgagcattttggcgcaaaatgacctcaatgatttccttctcttggtcatagttcatgccacatggggttagggaaggttcatttagatttagctgtgacggtaaaaggcattcaggacttgtatggccaatgttttcaagtaatttgtcaagaacatcatccccctcctcaacttgagaagagtctttctgaggtccaaatgtgtcacgatgccagctcgaaatcagaaatgaaggatttcttccattgggtgctaagcagccttccaaaggtccatataaaaccttaccatcccaagagtacttccctgagatatccctcacaattactctcacatcagagagagagcccactggtgatccccctaccggtccttctgtgggtgtctgaaggtaggagatgagggtgctatcattaaatacaaacagctgcaggtttggacttctgaacacctcaaaggacagctcggagccttccacatgggcattgtcatggttctcgctgacaaggctgtgcagtatggcagggcccccactgagggggtagtgccccaggtggttcaccaggtgggccatcaccattcgagcagtcaaagggatcaactccaaacttcttctcttcttctctgtaaacagcggtaaagaaacataaagagtcagtggtgaatgaagattaaaactcaacaccttttttttgggtggggggcagggggcagttccaatatggtagattacaggcttttagtgtgcctcagccacttggaaatagcaagatagtgcaaaaagatcaactctctgagctttaattcaggaaggaaaatgggaatccactggaatcgtgaaggatgttccagatctcagggaggacaatgcaggcaaacagcccttgtgatggcatccagctggtaagagtgagtgaagccccagtacccgagacagaaacagtctctctctgtaatttacccttccactggggatccaagcaacccaggccaaggcagagaatgatgtttctctcaagccccagagctatcttggggagagacttggaggtgctgagaggaaaagacaccagaaaaagctgcaggcaattcctagatctgggactgagagacaggagcacttgctctggagtggggcagggacttccacagccagaactgtggaaagcgcaccagcaggaggcactggaattgcactcttctcaactgcaggcttggggtgggaggagagagctgctacagctaaagtttctcctgggcaatgagacttgcagccagggccagcttggcaacacagaatcagtctgcatgtgtcattgctgagtgcaccaggctgctcccctgagatcatggtgcagcagggccctctctgttccattcccaggcaggactccaggcagtaagtggaaatcctttcctagactggcagcctgagctgccccaaccttcctgtgcacacatcatggtatagtagggccctctccactccatgcttaggcagatctccaggcattcagaacacctgcttgcctggatgagcagcctgagccatgctacccttcctggacatagattgtggtgcaacagggccctttccgctccgcacccaagcagatctccaggaattcaaagcacctgctcacccggactggtagtctgagctgcttcaccctttatgtagagatcctgcagcagggagcccctctctgcttcatgcttaggcaggtctccaggcactgagagctcctgcttgcctagttcagcagcctgagtctctccatccctcctctgccgagatcctggtgcaggggaaccctctccactccacatccagatggatctccaggtattcggcacacttcctcacccagattggtggcctgagctgccccacccttcctgtagagattatggtacagtggagcccattccactccatgccccagcagatctccaagaattcagagcacccactcatctgaatcagcagactgagctaacttgcccttcctgtgcagagaccatggtgaagtggggtcctctccaccccatgcccaggcatatctccaggtagctgcagtgcctgctgatctgggttaccagcctgagccaccccacctttcttgtgcagagactgtagtatagcagagccttttgcactccaagcccaggcagacttataggtacctggagcacccaaacccgctctcctgatcaggagtttaggtgcccctctgcctgtgcagagaaccaggagccaaggagatttcccagctccatgtctaggcacaccactgggcacctgatcgctgcccactggattctccctcagcactgctacttgtgcccaacaccaggggagctgtaaatgagcctgtccagtctggctcaacccattttgccccctgcccacccagggctaagcagtgagctcagaccactgtgcattccatggaccactccattgcctgaggcaatagagagcttctgctggtaaacaaggatcaagtatatacctagccaccttgcccacagccagcttttacccataaacaccatctactggcttgtaggtcaaatcgcacagccccatataaaacctgccgacagaagtgcatagggctatagaagcaaatccagaagatggcagattggaggcagtgttagcatgcgtctcccactgggaaggacagaatagtgtgtagagattcacactgtgaacttttttccaaggagcaatacaggaactcaacaggaaaactgcaagaatccacagatcctttgaaagaagcagaaagctgaagtctactccatgagacaggtaaaaaactataaatcctcagagtgtcagtcgggggagactaccttcagaatacacatccctatgagggaatctgaaaatccaggtcatgggagaaggccttaaccctacccagagctggaactgcttaagggagtgatgagaaacataaaagtagaagcagcagcaggaaatgccttgcaggcattctcagtctccagcatgaaccgagggaagccatacctgaatatatctcacaggggaccttggggaagccagtcaactagctcagaaaggggttgcagggtgaaagatgctcctaactgaatttcgtgatataatctcgagcagggataaactcctttgaccagaaccaatgggagtggggcggggggggcagggaagtgcactgcagacacatctgcctcatgggcagacaggaggggcactacccgaaagccaggtgggaaagcttatggcctgcggcagatctgggttctgcgtgcagactgcctggatctaaacctggtgctgctagtagaacactgagggagtgagaccggccttgccaactgcatgggagctgggcaaggcttactgctgcctgctactctccactcccattgtgaactcttctgtgcagcagaggcagttatactatctctggaacattaccctgaaaaccaccccctgaccctcaaaggagccatggctggccccactcaaggagagtcagagcacagacctgctcaaccctatccccacctgttggtatgtatccctgcacccaccctggtagcttaacacaaaggacataaacttgtgggagctttacagccctgctcattgcctcagaaccagattacttcccctaggcaatttagggcaagctcaaatcccacagctagtactgcagctggtgctctcttgcaagcaccacctcatggctgcaagctagctgatgcagcccactacagcatctacagatggaataacactgcccaggaaggagaaaatggctgaatgacctcagctatcaccactgcctataatactctagccaccagaggtcctgagcctgtcgaagttaaagttaactacaattaaaaccagcattcaagaaagccagcacactaagcatatctataaccaagcaatctcacagagtctacatcactcccctgccacctccatcagagctggtgctggtacccactgctgggagacttgaagaaaggtcacatcaccggatcacctgcagacatttcccagcagcaacctggagtgtggcagccccactgggtggctagacccagaagagcaatagcagtcacggtagtctggctatcaagaactcctattcctagggaaagtgggagagcaccacatcaagggaacaccccatgggacaaaagaatttggacagcaggtcttgagtcccacatctttctgccggttggaagtctcctgcagcagacacaattgcagtgctgggtgcaacagggaaagtctgcacctctaccccaacaggcaggcagcctgcatgcttgtgaagggtcgtggagaaggggtccttgttctccaccttgtccaccaccatagacacaactggaacttctcccatgcgaattcagcatgaatgtacctacagatagccctcctggaacaattcacggtggctgcatcctcacagaagcactctccaagtttaggcttgcacaagaggcagagtcacaattcctttctatatggaacatcaacatccctcatccctacagatgaaaagaggtgcctgtctgatgtgaatagctgaaacattaggacaggagtgaggctgggaggtgggtaactttcttgctggcctgacaggggaggtggattagttcccaatcttcaccctgataaaactcagtgcatctaactgagagatcccctagccacattaatcaaagctggggcctcagcccaccattgtgtattgtatctaaccacctgctttagctgcaactggtttctatctagggatacttcccctactggcctgaagcctggatcatcaagagagtaaataaaatactggggaaaaattaaacaaataaaaaagtgcctaacacggggaaatgagataagcttcaagagatccttgccattccaattccacaggagacaatgaaattgcccacaccccgagtacaaaactactacaatcagcatctgagaaagtcagcatacaaagactctctataaccaagaaactcatgtagagtcttcacccctaaaagcagcaaaatcaaattaggctataataaactataaacattaaagccacatcttgaagagggggaaaaaagaaattaaaaaaaaaaaaagtcaaatcaagaataaattcaagaacaatttgaagaaacagtctacacaaatgagaaggaaccagaaaatacaggtaatatgataaaacaaggttgaaaagatcacactagcttcctagcaatggatccaaaccaagatgaaatctttgaaataccagataaagcattcagaaggttgattattaagctactcaacgagatcccagagaaaggtgaaaaccaacataaataatttttttccccccgagatggagtcttgctctgtcaccaggctggagtgcagtggtgcgatcgtggctcattgcaacctccgtctcccgggttcaagtgattctcctgcctcagcctcctgagtagctgggactacaggcacctgccaccatgcccagctaattttttgtatttttagtagagataaggtttcaccatgttagccaggatggtctggatctcctgacctcgtgatccacctgccttggcctcccaaagtgctgggattacaggcgtcggccaccacgcccggccaccctgaccagagatagttttgttatggatgatgaagcattacactgagtgaaaaaaaataccctcaaatttgagctctttcttgcttaacctaaaatacccacgctatcacctttatttttccttttcactttctatatgatgtatccgcttggcaaggacgtgcacaccaatatgtttttaagcatcttgcctatttgcttagttaatatgtcagtgaattttaaaaactcctttgtcagagaagtttaagcaattatttttagtactttagaactatcttgggaatgtttcccaaagagtattgtacactgaaagaaaaatggtgccagaatttaaatgtatatttttaggtttttcctttttcaataacctatttatcttctgctatttttaagtgacaactcataataaatggtgaacctattttagggatagccatgttttggggatatactcatgtggatgagtataaattgatgactttaggaaaaaacaagttaattttattataagacatatgaacttacagtagggaacaacgaaatagattaagagttgtttcaattacttaataaaaataatttatcattgtgggggaaaaagtaaagcagacattgcagttgacagtggagctccagaaataaacaattaaatgattaaataaatggagaacaaatcaagaaaacaacatgaaaatgaaccatgtaccatccaccaccaacacaactcaaaacaagagtgttaagtctactccacgtcaaaactttcagagtaaataatgcattttaggaacttggtcattaaatcttaggttcaaattccacctcccttacttctgacttgtacacacccctgggaatatcccttaacctcagtttgctcatctacaaaatgcagctaaaatcaggactgctagattttaagcccttgctcatgactgtcacccccagtcctgtctttttcatcctcatctcaccttccccttcatgtcagcttgaaccttgctccagactctgtagtgctgcaagcatacccctggacctttgtcctccctcacccagccactgcctgctgtgtccttcctccttccactaagggcctcacaaaaggagtctgactcagggatctgactgtcactgcacaggtcacctgctcatgttatctggctggacccaccactctggtgaaagtgctctggcaaaacctaccaccaaacacctagttgggaaatataacagctcctgtttcattctcaccttccctaagctttctgaagcaactagcactgctgacctttctcaacttcttatttgctttcttccttgacttgctagaaatgactctttcttggtcctctttccacttccctgactttgctttcctggtgacattccctcactctgctgtccttaaggatgtttctgcccacaaggttctagtcttgggcctaggtttttaacttgtgaagtccatacaattttcatggatgatctaacacttcacacctacatctctttaatttttttttttttaagatagagtctcactctgtcgctcaagctagagtgcagtggcgctgatcacagcagccttgacctcacagactcaagtggtcctgtgctcaagtgatctgctcgccttggcctcccaaagtgacgggattacaggtgggagccatgatgcttggccttcttctaatttttagtgttgagacaactgaagattcacatgcagttgtaagcagtaatacagagagacctcaaatacctttcatctcagggtaacatcttgcatacctataggacaatatcacagtcaggaagttgacattgataataatccatctatattactcagtgttcaccagttttacatgcatgcatttgtgtgtgtgtgtgtgtttggttctatgcaattttatcatatgtatagacagtatacccacattctactcccattccaaggcccaaagctgggctcttatcattctggggagaggggtgcttaagtaagaaatacagcaggctctaagtcctgacaatccctatatgctctgaaatggactctctgctatgagcagagcaaatctaaaactgtagcaagtaaatttccatctctttttatgatgctctcctaacttggaacaatctatgagctcctttcaacacctgcccaccctgctaagtctggcttaagtccttcttcatggaaagccctcatggtgctaccagtccacagtgagtccttctggacttcactgtgtgttttccattagatgtaaagctccttgaggatagaaaatgagccttttttgtgagttccatggatttgagacatacctgtcttcaataatacaaaaaccatttgaactactaaaatgggaaaacagaggagaaaaaaagaagaaacaaggaaggcagaatttgccatcacagaggactccaggaactaggatttcaacttcaacaactagattaaaaaaaaatagagcaagcatggctaaaggctaaatccttccttttccttcccacaagatttcatacctgaaagaatactcaccctcttcaacagtcagcaggttacccaattctgctgatgaatgatactggactggctcagagctcttcacatttgccagtggcaggaaggggtcataatccgtggatgacaagtcagccagggtcagtatgtagtgactctgttgggtgtacgtgcttgagccacacacacagcagtgcaaaacctgtgaaaacagaggccatgtgcaccacggatgctactcaccgcgtgtcccctgacaatctgtcaaactactgcagcacttggcagctaggactcctgcttggtcctagctggaaatggaatgaccactcttaaatatcttcttgctattagcaaatttattttgctcctttcatatcaatgccaagaaatatgttctcaaggcaaaaggaaagtaaaagttaaaaagtacttattcacattctgtgtgattgcacatacctaagtccccctcctgtccaccaaaggcggcacaggtagaaggaactaatctggggatgaagggtagtggtgggacaggccaatcacggtggagggtggaatgagcacaacaagcagagaccattagtgcacgtcataaccagtaatgagtttaaattagtataactcatgacgccataaattgtaagggctaacttaatacaatttttaaattattcttattttcacaagattagttcctgaaagttcactggttgtttacaaattgcagttgattgaagatctatctactcatttgagcctttgtacacatacaagccatgcaaacacaaatcatcttgaatatgccaaaatgcataaatgaggtaataattgtaacagatttccctttttaatcataaattcaagatcatcaactccaaacactgatttttataagaatcaaggtaatacttgagaaaataagaaaacaccattgggttaaatatatttatgtaaagtaaattcacttttagatgactagctttggtttgctgacatggcaagaggccttgtggtcaggtaccctttgtaaataagtaccaagaattacagttgtcagggcaaccacttgactatgtcctcttcctagcaaaaaatgcagtataggaaaatccttatggcagctctcttattaatttaaaaattaagctgcaatcactgagagaattaatttctagtagccaaaatgcaataaatgtaggaaatgcacattaaaaccacacgttatgtgtaaactagcacaactactttggaaaattatttggtgttcaccaataaggcagaatacatgtattccagcaacttcactcctaggtatacacccaacagaaatgcatacgtatatgtacaaaaaaaaaaaaaaaaccttgaatattcacattttattggtccaaaactctaaactatccaaatgtctatgaacggtaaaatgtataaatacattgtggtttattctatgtaatactatatatcaccaagagtgaaaaatctgcaaatattcacaacggtttgaataaatcactcaaaaataatgttgagcaaaagatgtcagacaaaagaggatatactgtatgactcttgtatagagttcaaaacaggcaaaactactctgctctgttacacaggatagcggctatccctggacatgggtatgggaccagtggctatggggaggcacagagaaggcttccaggatgccaggaatgttctgtttcctgatctggactctgattttacaagcatgctcacttggtaaaaattcaccaggctttcacttacagactgatgcagttttctggaagcatattatacttcaataaaaagtttacttttaaaatacaaaacaaacagttatttagtaaatttatgaatttttactatgaggtgacttttacagtggtaaagcaattttaagagaaatctttaagaaaagaaagaactcagaaaagagatttacaaaagtgattgtggctaatgccgttggcccaaaccaagctctgtacaggtttataaaccacaaaaacaacagaagtatctaatgaatcctaatatagttattaaaatctttgactactgaagaaaccatttaagaatacacaaatactttttagtagaatttcaaccacaattaggtgttttttttttaaagtaatacttttaaaaataaggcaacaaagtaatcagtctgtgacttggactcttttttattattaaaggtttcttactaaaagaataaaccacagaattttccctccatagcagtaattattcagtggacatgcaaatgctaaacaaacaaccaaggtttgagagacactgttaagacaaattacagaaggatattataagcaatccagagcaaatgccacacctagtcatcagtgtgtatgtgtgtagagggaagggatggggggttaactaagaatattttaaatgttataaaaatgatgacgctaattactttgatgtgacatagttccttaatttatttcttaagatttttttgaggcaaaacgattattaagaccattaaacctttttcttcctttgataaacagattttgtcaaactaatgctgtatacaaatagataaaagaaataagacctggtgttctatagattagtagggtggctgtagttaacattaatcaactgtagatttcaaaatagctagaagagaataattccagtgtccctagcataaagaaaagataaacatttaagacagacaacccaattaccctgatttgattacgtgaatgtattaaattatcaaatgtaccctgaaaatatgtacatctaatatgtatcaacaaaaataaattaatcttttaaaaagaagctacttgccctagggaaaaaattaatgtagatatccctataatatgaacagttctttaagtagacatagaacatgttccatgaaaattgaagaattctgacaaaactgcagttgtttaaagattaaagatgatagtcatgtaaaatgcatgcatctttaacttggtaactaaccactgcttctttacatctgttctgctttcagtccttaagttatttacttttttggggggggatggagtctcgctctgttgcccaggttggagtgcagtggcgagatctcggctcactgcaaactctgcctcccaggttcacgccattctcctgcctcagcctccggggtagctgggcctacaggcacccgccaccacgcccggctaattttttgtacttttagtagagatggggtttcaccatgttagccaggatggtctcaatctcctgaccttgtgatctgcccgcctcggcctcccaaagtgctgggattacaggagtgagctaccgtgcccagccaagttatttactttttaagaaaacgtttaagccaccataaatccttttcaaaagggcaatgacaaataagtacatgcataagacatattttggtggttctctgtcatataaacccacactccattcccccaggcccaggtgtagactcaccctgtagatataatccagcaagggggctctggccgaatgctgctcctctaggactgctgtggacacggggtggagaaggacactcacgggcaatgccatgcaccagtccaagaggcagagtagcaaggacacaataaactggaagaagaacatgcccggtagcttatgctgcagtctcttaaacctcactacatgtaataataagagaattatccctacacccagtattcagtggacatgcaggtgctagataagtaggtaagtaaataaataaataaataagtagcattttcacaaaaaagactgttaaggccaatagagaaggatattacaaaggatatcactagttgtaacattatttatcattttaccttacattaaaataaaaaaactataggaaaaacttagttaatgtgccacctaccttcttgtctgtttccactgaggagtactctgcacttggtaaaagaaaagcaactgtggccacgaggatctgcataaaagataaatccccaatcaaacagaccatatttgtaagcctttgtaagcctatgttaggagtcccacgatggccttgcaactaaacccagcttggtgccaactcaccacagaaaggtgataaaaagcagagggccagctgtgtggtgatcttgaaaattagggaaagacaatggggccacatccagtttccactctacttttctggttgaaaaattaggagggaaggcagagaaaagagtatttctctctgcagtcacataattctgaacattggtttccacagttttcatagtgaagtaaaaaaatacttctaaaaataattatgaaaatgctcccattttagttttattgtaaattaccctacatctccacctgctatcctggtgtaaacagcaccccttttattctcaaaagcagtcccatttagatgataaattacatcatcaccccaaaaccctactttccatttcagagcactttatgttcccatgtccaaactccatttcactctaggtcacttaaggtcaaaaatcacttgtgccttttaacgtgtctctgagagaacaaagtgttctttccagtgaaatctgtctagggctgagagaaaataaatgaatatcacttctctctccttgtaatacctcatggggacaaatgaagtttcctcgaagagttaccactggatgtataagaacagggcatgtttttaaagtgcagctacaaaaatcagtagaagtgccttatcccatggacacctacgggagtgaagctgcctgcttgtgtacaggcaaagcacacttggatgcaagtggccttcaggatatgactgtggagaagattcttcctattccttccgcccctctttcctaccagttacccccacaaaggttatcgtggtagcaatctcattacagccggtaatcatgctagggcagaaagtgtggtccagggctttagtctgggagagacttctgttttacacaacagctgcccccctccacccctcacggagggcatcataaccagctgcctactccttgttggcaccatccaaattgctcttgatgaatgaagcccaatctacaaaaggtctctttgttgtggtcgtgcctgcctttcaaactccccaagtataagcctctgtctggaatactgctggcttctttacatagtgcctgaaatcacagctgagaagaaccagtctaacttaatcttaaaacgagtgacttgtggcaatttaatagttggttctctaacaattatttgaatatctataattaattaaatatcaaatacagtaaaaaggaaatgcttatgttttagtattacagaaaaaaagacttacttctgccattttccgaggcagagaggtttcaaacatctgaagcttctcccagtaggaaaccagcaactgaaggacatcgcaagctacctgggccacgattttgttgggaaactataaaaggaaaccgaatcccaaagcagacacataacttaacaggtgtatcgttcttaaggacaaaatagttatttcttctcagttccttatagattacatttatctgttttgcctcaaattgatgaaaaatatgtcctattaccacagagtttagacatcgtcacatcaccattttaaaactgtctcttctctagcctcactgtgttaatttacataacgttctacaggaacaaggagctttcatttactcatttggaaattaaaaccataattcaaatttcttattcagctcacataaatcatatttttgacaactagagaaaattaaaatgtacccccatacactgaaccttttacaaggattttactcattctctcactgataaatcttcactgacagctctgcaaggtagatgttattttcattttacacatggagaaacagggattgatcaaatggctttctatcctatgaaataaaacttgacctacatgtataacatactaagaatgtgtaaaattagagtgtaggagaagataactaatgaattatggtatactcaattattttgagtatgtttcctgaggctggcgtgcatctcaagtcaccaacaagggctggatgcttccattgattgcgaggcagcatgtctaagggcagcaccttcaaggtcttactttttcatgctgggagagcacagaagggacaagggcaccctctgcttccctccctggccagaacatggggctacaccattatccatatctcattatctatagcaggaaaggttcgtcgctgaccctagtctagggacacctcactctaagccacatgaagcagaccatcatcaacttttagtgccccagtgacaaatgtacagaataaggaagaagataagggaaaggtttttaattctacagaataaacagttactgactacccctacctgagaggcactagctaaacccagggttgtagtcgttgcactcaggggctcttcacagccttctctggccacagagacctcacatcccagatgacccaatttccactgaccttgttccatctctcaaacactctggcttgcttctgccccatggcctttgcacctgctccttcccaactttgcttggaacacttaatccccaggtctgcatgtggcttgcattgttatacctttcaaattgtggcacaaaatgtcatctcctccctgaggccaccacaccgccctccccccacacccccaagagctgggtggtggcccaccccctcagctcttcagcttcatcctattcccctattagatctccttcacagcattacaggctatcagcgctgacctttttgtttgttattttcctgcatatattgttcaccactgtatctttaatgcctagcatggcccccttaaggatgtgcgtggtgtgcctaaggtgaagatgaaactctgagagagtgggagaacatgagtgggcactgtgtgtgttgctgatgcaccacagtggcagagtcaccaggtggaaagataaggctggcaaagctctgaactcaagaagctggaaacagacaagggaaaattacgagagcccacagacaagacacaaaagctatgggcagacaggagtgggacatgaggcttgggggaaaacaggcagagagaaggcatcgtggagggagaggagagctaagctgtgcctggagaatgcaggggggatgtggggtctccttccaggtatgggtggcaaggcccaggcaccaaggtaggaaaggtcggtcggatacagggggctgcaggcagggtggtgttactgacatgtaatgaaggaggtggggaatggtggagatgaaataagccattcatttgctctctcacttctccagcatatagtcatagaacaccaacagagtgccatgctgagcgctccagcctgtgggctgcacaggtcagcctgtgcatggacagatccctctgacggtggtatgaacagtaatctgtgggggccagtctaggactggtgactctgatcaggaggctgagtattggcagggtgagtgtgtgagggatggacttgggcagtgggtgggacggacgatgggtattcaatgggcattcaggaagtacagctggcaggactcaaagccagaaacagtggggtaaggagaaggaggaaagtcagtcatgtctcagaagacgaggtgggagaaggagcagggctgggcagttcacaagagttggtgagtatggctgtggcttagaaccacctcccccaaccaccccatgcctgccatccatctgctaccccaccataaacaaaccagccaaccaacaccttgctgagtggaatgctctgcacattcatgggtgcacctaggtcacccttgcagggcatttctgaagggttcttacaagaggggtggtgctggctttatgtggagcccgtaaagcaggaagccctgccagagcttgcactctccgctacccatgaagcaggctgaggctgggctgggggtggggccaaggcccccactgcctcctctttctccatctctccctcctggcagagccccaaagcctcctagagtcccctgttctcatagtggtggttgttctcctcgttccttgtagcaactctttccctcccagtcctcatttcttcgatttatgtgctatgtccttaggtaaaacaacccagttgccacagcaacacggaaactagagggaggcaggagaggagggcagtggggagggaggtgtcctcagagaccaggacttaagtcaatgagtttcctgttattaataatggttaaagacagaacaacttggctgcatcctgatccctctgctttcttagcaattcaagctggagtcagttctttgaccttcctcagtcctcttctcttttgctgctatccagaggggggaggattcaacaggacaatctccatgctgtgctgggatagcggacagagtgagagctcaatatgtggtaactgcattgtttttctggtgtcttatattttcccccataattatagaaaagttgcagaaagaatatctatccctctactctgttatcaatttccatctctttcctatactatatagaaatatatatacagtcatgtacctcctaaatatgttttggaaacatttggtaagcaccacatatacaacactagtcccataagcttatagtgccatatttttactgtacctcttctatgtctagacatgtttactcaagtacttaccattgtgttccaattgaatattcagttcctacagtatttagtacagtagtgtgctgtataggtttataacctcagagcaacaggccatcccacacagtccagaaaccatctaggtttctgtaatattctttatgatgttcacacaacaatgcaatcacctagcgacactcttcttagaatgtatccccatcactatgcgatgcgtgactctgtgtgtctgtgtgtgtctatctccttcaatctaacacaccgagttattcatagtttttccatggaaggagtagagatgggggaaccaccttacattaactatatacatctagatttaagaaaaaataaaaattcaaaaacagatcttggaattgaaaaagggtatttaaaaatgaattggaatctacattgatctataatttatagccaacttgttttcactttaataaattatatgtaaatatttctccatggctttgggagtcaggaggtatcccacacacctcagttgtgtaaaactccacacatgtggccagagtgttctgggtttggctttggcaagctccttcagttcctagtcagttcatctacctcatctgtgaagtggaggtggcactgacatttcccctcacagggcagctctgcggattaaacttgcctacaaaggtcagggctcagcaccctgctgtggctggagggacactcttctgtgatattttggttggataatttttccattcctcatcacagggatcagcagcaagtgtttttccagctcccataatacaaccaccacccccacctccactaggtgttgtggaggagaaataggggaggatgaggcaatgggggtggtcagagggtgtacttggggaacaggaggcattgagtttggtcaagcaggggccagacgccaaatcaaggatgggagacagcactggctggtcatcctatgggcagaagcagataatgcacaaagggtggtacagagactgttgctggcctgatggcgacagtcccaggcgtcagctgtaagtgccgttgctattatagctgcatgtggcagggggcacagaagggcatgcagcagcctgaatgctggtgttaggtggatggttcaggggttgaactttggctcagtgaggtggtcattctagagccttgaacaagttccttaatgatcctgcacctcagttcctccaccagtaaactgaggacgcttacccctgaactaagaacttccacaaaaccctcagcacagcgcctggcagagaccaggcactcactggttccctaagtgtgataatggcaatgctatttattaccaccatttccaagcaggacctaggaaaggatccagcaggatttgagctctggcttagaggcagcctaacagcacctgtgaaagttcaagcatgtctttaacaccacacagatctgcttttattgctggttccatcacttatacctgtgtggcctcgggcttgtgacctaatttctctgggccttgatttcctctggtataaaacagaaattgcaacatctatcttgcagagctgtcttgaagattaacagaattatttagagttcgccattactctgacctagtgtgagtgcccagtgaatggcagttcttcttctcattaacaaaacaaagaaacaaagatgtccttaaagtgcccaagattcagccagatggtgaacactgagaggcctaactggaaggtgtggaggcctctcccaggcctgctgaagaggccagagcacgacaccccactctcttgtcacccccaccaacaggtgacaggtgacctctttgcgacaggagcttcccagccaccagaggaacccatttggccactggtccaggaagactcgagacactcgtggccaggctgcagctgccagcaggggagcatccgttggtgcccctcccgggagcctcacagcacatgcaatgggaatcacaatccctctgtcatttgggggataaaaaagatggggctaattcaaactcaaactgttaaatgcctcagatatggcttaatatccaatcagcaccacaaactggtaataccttcagagttactcctatcacattgatggcctctttcacctgagggtggcttgtacactgtgcaagctcttcacatatccagaccccaagggagcaaacagcaatgcatctttttaaaaagaagaaaacagaggaaaactctcatgaaacttaatatactttctcagtattttcaaataacaaaacactttaaatctatttatacaaaatagcaaatattatagatctattagcagaatgttttcttgaaagaaaagataaagaaccctcaataggccaattttcaggacaaatagaaatattgataatggtttagtacttaaatatttaattaaacaaatggcatattttctattaattgtcacagcccatatatatcacttagttttgttgaaactaataggttattacatttgactgtttcaagatatttttgaggaagaataagaaacataaatctgagaaaactgtcaaaaattgtgtttgtaattgttttctttaccataatatgcacaatacctataccacaaacataaaacaaatgctatattttattttaaagtatatttaaatacaactttcaaaataaatttcactgttaattcttctcaacagtgtgctaggaccagatattcttcacagaaagccgaccatgccatatacatttctattctgtttttaactacacagaaatttggctttctacactaaagaaagagagaggaagaagaattgccaagacttgatggtttagatgcagtaggtgtaggaaaaagaagaaatcaagggttttctctaaatttctgaactgaaaacctgggggaatggtggggccatgtggtgagatgaaatctgaggaacagtcagctcggggggtcagaaggagactcaagggctcagttatggttgtgttaaaacattcaagttgagatgtcaagtaggccgtttaatatataagtctgaatataaaaggggttcactgaagaggcaggtaaataaatgagcaagaagatggtatttaaaggctgatcagaataagagtgcccaggaagtcatagagagaataggcccagccctaagccctgcgtcactctaacattcatcagagattaggtagaggaggagaggtcagcaaaagggacagaaaggagaaagttcagtgaggcaggagcaaaattagggaattatgttctgaggaacatgcactattcaggaaaagagtaacgagagactagctgcaggcttggtaagtatgcatgttcaaatacctagtagaacctctaaaagaaggaaagggagcctatgatttaaaaacaactgagataataaatagaatggaaaaaaaatccaaaaaaaaaagaagaaagaaagaaagaaaaatgggatggggaaatgaaggcaagataaaggagaaataaaagaaatattataccttatttttaataggatctttctttcctattaaaaataaagtataacatatgataagagaagtacatccaaacagatcagtaattataacaaacgaaaatgaatctaaagcttcagttaaaaaataaaggtgggatgggataaaattacaaaatctggatatatacagtttttgcatagacatctaaaagaagactataaaaaggttaattaaaaagaatagaaagtattatttaactaaaccagtggtctttaagataaaaaaaaatcctccttagaaataaagagtcactacaaacatgtaaaatatttgattcactatataggacaattctaaacttttacgcaactaatcacatagcctcaaaatatataaagcaaaatttgacagtatataaggagaaatacataaacacaccataatagcaggagattttaacatttttcttccagaaggtgatcaagctgatgaaaaaaatcagacaggatacagaatatttgaagcccagtagtaaaaaaatttaataaacacaattagaagactatgcccaacaaagaactgggcattcatttttttcaggtttatatgggatactgacaaaaactgactacctagtgggtcattaagcaaatttcaacaatttcaaagactgctgtaagacattttgatccacaatgcaattaagtaagacatcagtaaaaaaagatacctatagaattcagacaaagtagtaactagcaataaaaatatagtcttaaatgtttatatctgtgcaggagaaattaatatactaaatatataaccttaaaggtaagattgtaaagaaagtaaaaggaaggatagaaaagagcagacagtggcaaataaaagcaaatataaaatagagaagttgaacaaagacaaaagcctagtctttgaaaagactaataaaattgacaaatttttggcaagactaattaaaaaatcagaggatacacaaaacgtgtcagagattaaaaagtggatgtaaccatagaagtgaaagagataaaagataatagagatggctgggcgcagtagctcatgcctgtaatcccagcactttgggaggctgaggcaggcagatcacgaagtcaggagattgagaccatcctggctaacacggtgaaatcccgtctctactaaaaatacaaaaaaattagccgggcatggtggcaggcgcctgtagtcccagctactcgggaggctgaggcaggagaatggcgtgaacccgggaggtggagtttgcagtgagccgagattgtgccactgcactccagcctgggcgatagagcaagaccccatctcaaaaaaaaaaaaagataatagagataactcatagctcatataccagtatattttaaaatttaggtgaaacaggcaaattcctagaaaagtttggtttatcagtactgtcaaaaaaaaaaaagtagaagaagaagaaaaccttaatagtcctaaaatcactgaagagaatgagtcagtggttaatcttctcatcaagaaaatattagacctaggtagttttaccatcaaggtctactaaatactcaagaatattaactctaattttgtaaaaactctttctgattaaagaaaatgaaatagtacttattttgtgagactttataaaattataatcaaacctgataagggaaggatggggaaggaaaattataggccatcaatataaaagcaactttcctgaacaaagtattagccaaaccaagtctggtatcacataaaccaagttgaggttatccaaaaacgcaatgttagcttaatatttgcaaattattatcagtttagcttctggtaaaagcagactaggaaatttgaactaacccatctactgaagataaccaaagaaattagacaaaatacaagagaaaaaacacttaaaatcatcaaatagctggtaaggcagtgatgaatgatgggctgctgtcttggaatgaggctacagagggagcagaacatgaaccgttcctaggagggagtaagaggctgagctgggcttctggtgatcttatggggtttgaaattgaggatcagagacaggtgttcccctccattagcattcccagctttggtcttcacgttgggaggagaggcagaaacttttcaatacgtaagtggcccagaaaacctcatatatcttgatcataggttgctagcaacctcagatgcctggcagaagcagccagaatatttccagacactgccaaatgtctcctggtgtaaaagatcatcactggttgagagtcactaccctacacatacaccatttctataaatatttggtttatattttcattttctttcttcttgaaaatatcagaggatacatgattatatttgtaatcttgctttttctcacacaaaatagtgtactatatactcttctgcactttacaatttttacttaataatgacatctttttaaataatcatgcaaagcatcttcctggcatcattcttcctagacttttcagtctgtataagagctatgtgaaagaataagtgttttcttttgtaacattaactacttacacataaatgtgtatcttaaaattctaaaatagtttacctcttattcaacatttaccttgcatattcatttggttcttctgtggcattcttcagtaaaatatttatgaggtaatgctaaaaacacaaaattaagtaaaataaaaactttgtgtcatagttggtttcccacatgttctgaccatgttccaggcagccaggagctactgaagttcgaccagggagctcagagagctcatctatgagtgagagcctggggggaagaagaacactgggctcgggggagcgggtggtagaagatgggggtctccacagggcctccttaggccattcagcccgcgggagtagagcgcttctggtataaagcaaatcagacttccagataggaaaatctcggttttcttttacttcaattgaattatatgttgtacactgaattatatactgtaattatgttttatagtttgattgattctgggattctaaaagcatttttgtttacctcaaagtcagctgaggagagaacaaatgcttacttttattctccaataaataatttagaatctcaaagtattagcagtatttaatcaggccaacaaggggattgaatatttagcttatttccattatttcttataaattaacttgatgcactaatgcagttagttaagctaataaaattattacaaagggcaattcactacatgattatgatccttaggtccaataaacaggtataataaaaaacacctgctatagctacagctataaggtctaactgcaatatactctgaatttaacacatgcatagcccatgaatagtcttctagaaacaactactgaaacatttaaaagatacagcaaaacttcaggaataagcagattaatatacactaatggaagagataatcatacatctagaattataaaaagtactaaacttgagatacagtcaaatgcgttatgtaccttgacatcttcagttcctgtaatggcctcatttacttctggcactgactgcagtaaaggaatctcctggtaggtatttggaaagcagaccagagagccgaggacagtgacagcctctgaacgaggcgcctgcacataaggaagaggagcacacacatttctctttttgtaagttagaaacgttaaataagtgacatgttttactcttcatcctagataaaaaataccaaacttggccgagttattctcttccaagtgcatatttaagcaaaagaggtttgcctaaatgaaaaagcaaatttctaagtaatggaaaatatcactgtacttggatgtaaacaagtgttgtggaaactgatctgcagattcattcagaattagaaaggccaatgactctgtcatgactgtttacattgttttactgctaatgttctcaacaaagcagggtaaaggatatcaactgaataccattttgctgttaagaacaattaaggaaaattcatagggaagtagagatggaggtaactatcggagagtagaaagagaagacaaactatcaaatttcccatctactgccaagaactgctttacgaaaaaatataatgagatactatatcactatatctagtgagatacttttatttgcccagtgttaggattaggtatatattttaaaaggcatggctgggtgcggtggctcacacctgtaatcccagcactttgggaggctgaggcgggtggatcacctgaagtcaggagttcgagaccagcctggccaacatggtgaaacctcttttctactaagcatataaaaattagccaggcatggtggtgggcacctgtaatcccagctactcaggaggctgaggcaggagcattgcttgaacccaggagatggaggttgcaggtagccaacacagtgccactgcactccagcctaggcaacagagtgagactccatctcaaaaaaaaaaaaaaaaaaaaaggcatttcactagatttcaactcagccaacactagcagatatggttagccaagaataggggactacacaggtctgtcatcaatctactcacctatctgtccatctatatgtctactattatgtaataaaacaatgaaagctcacatttaaggagttctcactctgtgctaggcactcttctaagtgctgtacaagcatttcttcataaagtcccctcaccaacccaatgaagaagaggctactgttttcattttccagtgagaaaactgacgccaaagaagttaagcagcttttcagtgtcatatggctcctaagtgatgcaccctggatttgaactgaggccatctagctccaggtccagactgagcctacagttaagcacttgggctataaaatcaaagagagcttttctccctcagagagatgaggcgcagtatgtgaggtaggtgaggagaggcaaataacagctacacacaattcagtgaagcacctgctaggagagcaacatactgaggatagcatgggagcccagtccttcatttttttacctagcttggttcccataagtacacaggtaaataaaaggcaatataaagcacagcagagctattccatgggatgaggcaaggattggttctgctcaggatgtttaggaaacctaaaacaaactactgctaagggccacagaggagagtagaaatcaggcaggctggcggtgggtgagggagccagttgagtagggaagaggaaggtgtccatgagatgggaggctgaaagggtcagaagcagtcgttcccaaagtatgttccactagggccacagggactgtgaaagggcaaaatcaaagactcccgggaaaaagacgttgcagagacatttggctaagcacaattaaacaaaagcctttaacatgttattgtacactgtgaatttccaagtgaagaagtgtatttcccaaaattatttgactatgaacctggctttcttccttccctttcccccaaagtatctggggagattactgttctgaagaagactttttgaaatgcttgtcctgaggttaggagagaaaagtctgggataacaattcacatgtgttcagaggaactgaatgcatgcgtctttgtggagtgcagagagagagaagtgatgacagaggtaggagccctgaggacgaagagacagacaacaggaagaatatcattaccaacccacagaagtcctctttgtgcccctcccatgatagcctcccctcctgcaaagtaaccgtattctgctgtaacaccacagattggttttgtctggtttttcaattaaataaatgaaattagagtatatgttcttttgtgtctgacttctttcactcattatgttatgtaaccgatcctgtgttttcattgtatataataatccatcttatgtacacactataatttaactgttctactgctgatgggcatttggattggctctaggctttggctgttacaaataatgttgctgtgcacaagcttctcctcatctcttggtgacttgtgcgagccatctgtgcatcttcctcccccactgcctcagtggggcagtcctacctagcaggggtacttcaaactggtaattaccttgtgctaactgaaaattctgactgagcaggtgtgctccagcccaaacacctttcaccagttcctctacaattttaacctcaagtttaaacaagaaagtactatcattcagagtgtgattccttcatgtaactcttacacattctcattcatattctctctctttttaaaaaaacattttggaaggctactttattaattttgtgttgattcttttttcaactttactaaagcataattaataaaaatttgtatatttaaagtatatacaacatgttttgatacacaaatacattataaaatgattaccacaaacaagtgaattaatatatcacctcatatagttcctttatgcgtgagttgtgaacacttgagatctactctcttagcaaatttcaagtttataatatagtattattaattatagtgaccatgctgacatctcccgaactcattcattcggcataactgaaacttttgatccactgacaaacatcatcccatctccccctaccccaaccacagcccctgggaaccaccattctacaatctgcttctaggagttggacttttttagattccacatataagtgacaccacacagtatttatctttctgagcttggcttctttcatttggaaaaatggttcattcatgttgttgcaaatgacagaatttccttcattttttaaaggctgaataacactccactggagatatgtaccacatttcctttatccattcatctgtcaatagacatttaagttgctttcatatcctggctattgtgaatgctgctgcactgaacatgggagtgcagatatttcttcaacatactgatttcagttcctttggatatatacccagaagtgggattgctgggtcatatggtagttctatttttaactttttgagaaacctccatactgttttccataatggctgcagcaatttaccttcccaccaaaagtgtagtacacggggatgaagatgtgtaggaaaaatggtatgactagcacacccagtacccaaccattcactaacccacacactcatgtgcaatatttgaaaacagaattaaaaatcgattcatggctgtaacatttattcctactatcatacctcaggcagatagttaaatgtatataacattacataacattgatatatgtgctaaagaccaagcaaattcgataccgtcagaaagcttaaaagataaggcactcatgtctcttttactgtagtttcaaagaacataacacttttttctttattgcaagctggttttgtatttcatcctttctgaattttttgaagtttatatttcaatacttccttccctccacattttctagtttgtgtttttccaggttctggttatgctttcattatttattttcccatcttggcaacacttcatgtgaatttgacctttacatttacctttataccatctttgatttgagtagtctctattgtgttgattctttttttccagctttactaaagtataattaataaaaatttatatatttaaagtatatacaacataatgttttgatatacatactgttttaatatacatattgatccttatcaatatgtttttaacctatgtctttggggatgtgttggttgtgatgtcaaatctcattctagttttttctgtcagaggcctcaaataaggaagaatcactattttggtaattggtgatcacagagggaatggaataataaatgggcattatatatcgcaatctaggcaatatataatgaattcaaataaaagtcaggagaattttttttttttttttttacgtatacaagagttctctttcctccacatccttgcctacacgtatcttttgtctttttggtgaaagccatcctaacaggtgtgaggtaattatctcactgtgatcttaatttgcatttccctggtgatcctgagcatttttcatacatagcagttccctcttatttaaaggggatacattccaagaccccctcagtggatgactgaaactgtggatagtaccaaaccctatatacactatggtttttgcaatacatacatacctatgaaaaaattttaatttataaattaggcagagtaagagattagcaataactgctaataatgaaatagaacaattataacaatatgacattcttgtgctttggggctattatgtaaaataaagattacctgaacacaagcactgtgatatcacaacagtccacctaataacagatatggccactaagtgactaatggctgggtagcagataccacgtggatccactggacaaagcaatgatccatgtcccgggcaggatgggccaggacagctcaaggtttcatcatgctactcagaatggggtgcaatgtaaagctctgatttctagaatcttccatttaatatttttggaccaccactgactgtggtaactgatatcagaaagtgaaactgaggataaagtggggctactgtactattagccaactgtatatctgtaaggctactttaatagcccacctagccacactgacagaaaatgaccaccatgtgtgatattatctctaggaagggctccaacatttttacaggaaactctcttggtaaataatgaacatagtattggaagttctggccagggcaatcgggcaagataaagaaataaagggtattcaaataggaagtcaaattatctgtttgcagatgacatgattgtatatttagaaaacctgatcttatcagcccaaaaactctttaagctggtaagacacttcagcaaagtctcaggatacaaaatcaatgtgcaaaaatcacaagcattcctatacaccaataatagacaagcagggagccaaatcgtgagtgaactcccattcacaactgctacgaagagaataaaatacctagggatacaacttacaagggatgtgaaggacctcttcaagggtaactacaaaccactgctcaaggaaataagagaggacacaaacaaatggaaaaacattccatgctcatggataggaagaatcaatatcatgaaaatggccatactgcccaaagtaatttatagattcaatgctattcccgtcaagctaccattgactttcctcacagaattagaaaagactactttaaatttcatatggaaccaaaaaagagcccatatagccaagacaatcctaagcaaaaagaacaaagctggaggcatcacgatacctgacttcaaactctactacaaggatatagtaaccaaaacagcatggtactggtaccaaaacagacacatagaccaatggaacaaaacagaggcctcagaaataacatcacacatcaacaaccatctgatctttgacaaatctgacaaaaacaagcaatggggaaaggattccctatttagtaaatggtgatgtgaaaactggctagccatatgcagaaaactgaaactggaccccttctttacaccttatacaaaaattaactcaagacatattaaagatttaaacataagacctaaaaccataaaaaccctagaaaaaaacctaggcaacaccattcaggacataggcatgggcaaaaacttcatgacctaaacaccaaaagcaatggcaacaaaagccaaaattgacaaatgggatctaattaaactaaagagtttctgcacaccaaaagaaactatcattggagtgaacaggcaacctacagaaagggagaaaaattttgcaatctaaccatcaaagggctaatatccagaatctacaaggaacttaaaccattttttttttttagacggagtcatgctctgtcacccaggctagagtgcagtggtgcgatcttgacttgctgcaatctccgcctcccaggttcaagcgattctcctgcctcagcctcctgagtagctgggactacaggcatgtgccaccacacccagctagtttttttttatttttattagaggcggggtttcactgtgctaaccaggatggtctcgatctcttgacctgatgatctgtctgccccggcctcctaaagtgtcgggattacaggcgtgagctaccaagcccggcaggaacttaaacaaatttataagaaaaaaccactgggtatatacccaaaggattataaatcatgctgctataaagacacatgcacacgtgtgtttatagcggcactattcacaatagcaaagacttggaaccaacccaaatgcctatcaatgacagactggattaagaaaatgtggcacatatacaccatggaatactatgcagccataaaaaaggatgagttcatgtcctttgtaggaacatggatgaagctggaaaccatcattctcagcaaactatcgcaaggacaaaaaaccaaacactgcatgttctcactcataggtgagaactgaacaatgagaacacttggacacaggaaggggaacatcacacaccacggcctgtcgtggggcggggggagcggggagggatagcattaggagatatatctaatgtaaatgacgagttaatgggtgcagcacaccaacatgacacatgtatacatatgtaacaaacctgcacattatgcacatgtaccctagaacttaaagtataataataaaaataaaataaaattaaaaataaattaaaaaataaaactgtatatggtaaaaaaaagaaaaaacaaacaaacaaacaaccccatatgaaagtgggtgaaggttataaacagatacttctcaaaagaagacttatgtggccaacaaacatatgaaaaaaagctcatcatcactggtcattagagaaatgcaaatcaaaaccacaatgagataccacctcacaccagttagaatcattaaaaagtcaggaaacaataggccgggcacggtggctcacacctgtaatcccagcactttgggaggcccaggcaagaggatcacgagatcaggagattgagaccatcctggctaacacggtgaaactccatctctactaaaaacataaaaaaaatagctgggcatggtggcgggtgcctgtagtcccagctactgggtgacagagcaagactctgtctcaaaaaaaaaaaaaaaagtcaggaaacaacagatgctggagaggatgtggagaaataggaatgcttttacactgttggtgggagtgtaaattagttcaaccgttgtggaagacagggtggcgattcctcaaggatctagaactagaaataccatttgacccagcaatcccattcattactgggaatatacccaaaggattataaatcatgctgctataaagacacatgcacatgtatgtttattgcagcactatttaccatagcaaagacttggaaccaacccaaatgcccatcaataatagactagataaagaaaatgtggcatatatataccatggaatactgtgcagccacaaaaaagagtaagttcgtgtcctttgcagggatatggatgaagctggaaaccatcattctcagcagactaacacagaaacagaaaaccaaacactgcatattctcactcataagtgggagctgaacaatgagaacatatggacacagcgaggggaatatcacatactggggcctgtcagggggtggggggcaaggggagggatagcattaggagaaatacctaatgtaggtgacaggttgatgggtgcagcaaaccaccatggcacatgtatacctatgtaacaaacttgcacgttctacacatgtatcccagaacttaagtataatttaaaaaaatgagtatttcaataaagaagtatgatttcccttcttgtatcttgtaatttttttgaaagatgatgtgaatggttaaaatacatttgaaaattctttgagattatcctaaattttttcagaaataatgaagtatgaaaagttgtcataattatttacgataaagccacagttgaacaaattcaacatttttcttcttctacttttttttttctttttaagagatggggtcttgttatgctgcccaggctgaactcaaactcctgatctcaagtgattctcccaccttggcttcctgagtctcctatagctgtgactatacatacgccaccatgcctggcctcttcttctcttttacctttcttctcttttgctcctgtctcttttcacttctctttgttttctaatttatctttataagaaaaagttagtgtgtgaaagcgccaacatgaaataccagctacaggaagtattttaaacaatttaatttaaaaccaagggcttgaagtttgaatttaccctgcaaagaagaaataagtgaaaaagtaatctcatatcaaacaagatttaggttgttggatggcaacactgatttcgacaccaatgcttagcaaatagtaaagctaattttatttataccatttgaaggggcaaagataactctgaatatataacagcttatagagcacaaatggaaaaggccctttaactttaaatgtataacagtattctctcaaaaaggcattaagatattgctttggccatgtgcagtggctcacacctgtaatcctaacattttggaggctgaggcaggaggatcatttaaggctaggagtttgagaccaatctgggcaacatggagggactccaatctctacaaaaaatttaaaaatcagccaggcataatggcgtgtacctgcagtcctaactactcaggaggctgaggtgggaggatcacttgagctcaggagtttgaggttacagtgagctaggcatgacagcaccagtgcgcttcagcctgggcagagaatgaatgggaccctatctcttgaaaaacaacaacaaaaaaagaaaagaaaagatactgccttagtagtagaggtaaatgtagagagtaaaaataatttttttgtagcccttactgatcatttagtccacttctaattttttattacaaaaattctgccaaagtattctggcatgttattaagagaatacatatttacttctagttaagactttactgttctaacattttaagaaaatattttctatgagacttataataaccaagacttaatttaaaaacaaaaaaaaacttactgctaatgtacattttaaaactctctattttagacatttatgtctgtgtcaccatttactggaaaatgctaataatattctaagagacaagtcctgcttctgactgtgtaaatgtgctgaaatattagtgaggatatgatttctcacactttggccttttgatgaaacgcctttccaaaaccagtgtgtcatcttatcctacaatttcacacatcagctgccagggtatctaccctgagagcccagtttcacattgcactaatgagtcaacacctgttaagagtggagaaatctgaaccttgttagcgattgtgaagcctcttgggagctgggatgctgagcattgtcatactcaccgtcaaaatgtctgtgctaaggaccctggcagcggccgtgatgaagtcccccaccagcattgagaagccaggaaaacccagggagaaaaagcggggtggacagtgccttatgatcgtatttaagatatcctaaaagggaagataagaaaaaacacaatcgtaatgttcaaacacaaaattccaaagtagtgtttgtagtggtacatatgaccactgtataataatccaagagagcacagattacagaaaattttcagtgaaagggatattggaaacagagttactccaaggattactgtacccattttaaaggtaagattggagaccccaagctgtaagatgaattatccaaaatctaaatcatggctctgagactagacatttcatctgtcttccgtgtaaaggtaggctccttggacaagctacaggagtaatgaggtaaatatgtaattaaaaccttcaaatatctatcactaaaacaaatgtcctgtctttagctttcaattggccacagttaaagcacagttacattaaaatatcttaaagtaggcaaagacatggaaaatttcactcttcagatagttttacgtgttcagaaatgggaatatgcagagtgctaaggtgacgttgtaatcagtgaaatgctaaggtcagggaaacagcatggctctgagtatatgtgtgatctcagtgcaagtacaaagtgcaacagtagccttttgcacagagtgcagtgtgaagagcatcatctgccccagacatcttgtgttcctgtgtgtgtaatggcctctcattgatggctggatggcccctcaccccccagctctggtctgaagcagatatctaattcttgcctgtggcagatcaggggtccaccactggacagcattcatgccatccatggccaggccacatctctgaagccatctgtgcaagcgtgtttgtgtgtgtgtgtgtgtaacaggaattagtaagaaaaccacaaaccacaaacttatgcagctgttggccatgtacattaatcaaaacacacactgaagtacagtcgtgtcgctttatgatgaggatacattctaagaaatgtgctgttaggcaatctatgatcatcttgtgaacatcatagagtgacttacacaaacctagatggtagatgcctactacacatccaggatacaaatgtgcacaacatgttactataccgaatagtgtaggcaattgtaacacaatggaaattgtctgcatatcaaaccacatctagcacagaaaaggttcagtaaaaacacagcactataatcttataggaccaccatcatatatgtggtctgccactgactgaaatgttacatgactatactatagtaacgtgacttatagttatacaacctattatagtctcaatataagagtaagaagcaaaatctccacacacacacacacacacacacacaaaatcctagtttcttttcttagatttcagtatggttatctaaaaaatccttaaaaataatcctgatttaattctatcagtatcacattagagcaaagcagtagtaacatgctaaattctaacatgttcagtctgtcataataaaaattacctcatttaacaacttatcttcctaaaaaactttgtatgtgttcacaaaccatttttcctaagacttttttttctttacatgggtcttagtttctacaaatcttgatatttacattcttaaaattactgtataatgcttaattcagtagagttcacatatggtaaatagtttagcaagtactaatttaaagttttagcatttcagcagacttttttcctacatcagaaataaacagataaatagataagtgaaaaaggaaggaaggaagaaaaaaaaacatgaaccatgcttcttccaggttaatgtttaagcctgctttaatcacgtcctttgatacactttaaggtccatatcagtcaaggcaaacattctaagggaccgagcagatggatgctgcagtttagaaagtgtgtggtaaactcaggatccaagagtggaacaaaagatccacctttttcataattaagcctctgattaatgccctaggctcctcagcacacacctgtaattactcacagaggtactcattgtgctgggacttgtctcggaatatcaggcatcaagctatccggcagcagatggaagcacatttctgttgacatatgttgcaatgaaaggattcgtgcaaacctggctagcaaggtagcagaatgccatgcatttgaagattaataatgcaaacaaccatgatgttaactttgttatgcttgtgttaattccatctgttgagatgtggaactaaaccttgaagcttgtgggctttaaaaatctttagcacatacttgaatcaaataagccccttttcaccactggaatttagagttttaattaaaaaatgcttttctaggctaaatttatgggaattatgaactaaatcctttaacaagctaataccacaatttgtaaatgaatccattttgcattgtaagatttgtatgtgtaaaggcaacaatctgtaaaatggggcattcaaaaaatatgactaagttgctatactgatgctaaagacagcagataggcatgtagctgagataaagtcacatggctccctcaccccctggacctcagccaatcacttcaacggaacctgctactatgagcaagaaggttggaaagagagggcaaaataacagatggctagcctaccctaccctgccacccacgtaagacagcgccctgaggagacacagcgcctgtgtgaagtcgccaaagacagcactgggggagggtaaatgggggggttaaagagggaactatatgaccagtcagccaaattatggccatatgcctgcttccgttgcttctccacactgaagtggaacaactcgaagactgtatctttgtgataacattttaaaattaggaataaccacgtggtactcaaagaagagccgctgcatattctcaatagtgggacatccacaaaatgccccactcatttctaactcagtagaatccttctttcaccatccccaccatacattaagacacagctataacagaagtctttgaaaaatataataaaaatctgaaaccttcctcacagcctccagggctttatatatacatgggaaagaatgatgctctcagacatgagtcattcatgtgcaatcctcatgccttttgccatctccctgtccaaagtgaacattacttgcctaacaggtttttcaaagtgactcatgttttaatttttttatttccataggtttttggggaacaggcgctatttggtcagatgagtaagttctttagtggtgatttgtgagattttgatgcacccatcacccaagcagtaagcactatacccaatttgtagtcttttatccctcatccccttccaccctttcccccaagtccccaaagtccactgtattattcttatgcctctgcgtactcagaacttagctcccacttatgagtgagaacatacaatgtttggttttccattcccgagttacttcgcttagaataatggcccaattattctgaaaaatttatgtgtatcctttctcataagtaaaaagtaactcaagtaatacaatgacagtaatcaatgctgctaaatttttgctaaaaataccatcctctgatgaagactctgggtctgagagcagctctccttgttgaatataagcacagaatgcaatgtcagggtggtgtgaaagaataacttctctcaactccagctggcctacctaacagtatcacaaggacctgcagagaggaggaaaggggccatcctttctactgtgtgattcaatgctattcagcgctgcctccactgagatggctagtgagaaacggccctgcactctgacgtggtgaaaagaactctagaacttgagccatgaggcctaggtccaaagccttgtgtgactgtgggcagatcatgtcatacccagagcttcatgcttctcttccgtaaaatgaaatgatactcccttacggagctgtatgtaatgggataggagataagaacatatgcctttgtaaaatgaaaagagccataaagaagtaagtagaatagcaagtaaataattatttttcaaaaagagaaggactctgaagagttttactttgtaaaatttactttataggtgtagtttgtataattcagtgaactattattttgctgatctacagaaagaatagtttaagacatttcaaaggtggcacacaaacaagcctcttagatcgcacattaccccagaaattcaaaagctctagaaattagtgctttcaagcaacacccttaacaaagctttacggcaattagccatagtgttttacaaggcaaatactgaaagaaaaacaggaaaattatcattttagattttctaggattcatttttctaaggagttctagaacttaatacaaagaagttcaagttagttttatagcaagaattagtttctttttcacacgttaaatagactaaaccacaaactaaacaataggctcaatgatatatggaatctaaaataaaatgaggtttattcttgagagttgaacatatgacacgtagacaaagatctttcacaagcttttgttcaaagaaattaaaattcatcctgcaaaatgttgcaatatagtgaacagatcaccaaactagtatttttctcttgctctggttaaaagtccaagtgaatactatacactgagtgtgaaaagatcactaagatgataattgtgaatctgtagcttatcaaaagattctggttatgagaaagtaactggtgagaacatctgtctcttatcactgatcttgcaaaaaatcaggtaattcaaatagaggcgtgttgtttcctctcctccaaagcacagttctataaacacaaaccatattcagcctggtaaatgaatcgctttaattgaatgctatgtacacagtaactggaaaaaccataagtgataagaaaaacatatggtgatggcaacagaaattggtttattcattttgcatagtgttgtttctttcgttcccttataattgacctttagagcgataaatgtgtaaaataattttgtttattatggctccaaaccttccaacaattacacaaaatgaaaatttaaaaggaaggattcgttctggaagcatttccattgtttacataattgcacagctataatttagtgctcatgttgttatggaaaataaaaaagggcgattacaggccatttcaattcaaaatattgcacagtggtgtcaaaatgggggaaaatgttcactttaaagcagtttaaaatggtttaaccctaaaaacaaaaacatttcaacatagcattctataaaacacaaatgttcaagaagtagccatcctccaaaccatattagaaatgttgcaactgtactttcacaccaattacatatatattattcacttaatatttgctcagggcccagcagatgatggttgtaacacaatagccagccatctgtctccctgcctttccttcgtggacttgcgcctgcttctcaagagcaaacagatccagttattccacctaaagtcactccgtccctccacgaggccagacacaatcatcaagaaataaaatctgcatatgaaaaatcactcaattcctcatttaactttttacttaaagaaaactaaacactacacagttagatgaattcatcactgttttttagagaagatgcctgtcttttacctaggaaattctataggaagctcttttatttggtaaagaggggaaggttgggatctgtttatcccagtaatctggctaacaaaaagatatgattcattctatacttggataattaattataaaaaatgtgaatgcagaggaatacattcatactatatatgaatataatttaaactttaacaatggagaagacagccacgatcctgcagtacttgtggacatatttttaagtattagttattgcccacctgctgaagttcagaaatgctgagtgacgagaaatttttagttaccagaagaccagatttgaagagacctcaaagctccaaggcctgattctctcatttctgctagtgggtctctgctccttcagcttagggcacaaggacatactttacatactacaagctgctacctggcttctgatgattaaaaaataaatcaaatcaacacggccctttaaaaacaaaacaaaacaaaacaaaacaaaacaaaaaacacagcagagcacggcgccaatacttcatttccagaaaagtcactgagaataagacagcaggacaaagctgaaaattactttcatgactggggccaaatatgtggtatgtgctttacattatgtgttaaaatggttaacttggtacatctgtctgggaaaaaagcagagattttaacaagtgttgtacacaatgtgacttcttagagtacaactatgttatgaaagccaggagaaatattacaggacagagtaattgggttctgcacctggagaatcaaaattgcctagtggcagggcatggtggctcatacctataattctagcactttaggaagccaaggcgggaggatcacttgagcccaggagttcaaaaccagcctgggtgacatatcaagacgctgcctctacaaaaaataaaaaaattagccaggtgtggtggtacactcctgtggtcctggctacttgggaagatgagatgggaggatcgcttgagcctgggacatcaaggctgcaatgagctgtaattgtaagactgcattccagcccaggcaacagagagcgaatctatcttaaaaaaaaacaaaacaaaacaaaacacaatacctagaacttctcaccagcagaactgccatgaagaagacactgaatgtccttgacagcagcatgctttagggaatgggaaacatgcaacaaactcctgaggccacaggagctgttctgagcatttgcacagcatcaagatttcaggagtgacagaacaagtggacagatggcagaaaaaggcactgtgatgctcaagcccaaaaggagaaccttgaatattttttataactgcttatctacaaagaaaaacttggctggcctttaaacagatgaagatggactgttctgcttcagaaaatgtggtatatagatttacttatttaaggaacaatgtacatgaattttattttataatgaagttgataactcactaatctgtctaaactgcctccttctcttggtaacagcttcaagatatatattcatatataatgaaattcaccctataaagtgtacaattcagtagtttttagtgtattcacagaattgtgcaaccgtagccactatttaatttgggagcattttcattacctcaaaatgaagcctataccaaaatgaagcaactatttcccatttctcatatacccagtaactggcaactactagtctactttctgtctccatgaatctgcctaccctggatatttcagcatatggaatcttactatatatatggcattttgtgtatggtttcttttacttaacatgttttcaaggttcatccacgttgtggcacataatactttattccttcttagttaataatacttaattccttcaaattaatattccattgtattgatacatgatgttttgttcgtcttttcatcagttgatgggcatttaagctgtttctaccttttggtgactggttttgatatgaatttctctggtgaataatgatgctgagtatcttttcatgttcttcttggccatttttatatcttctctggagaagtttaagtctatgtctttcacccattttttatttgggctgtctttttgttgctaagttataagacttctttaattttttaaattttcatttctttgtttatttttgagactaggttataaggctggctaattttcatatttttggtagaggtggggtttcaccatgttgtccaggcaggtctcaaatccctggcctcaagcaatccacctgtatcagcctccaaacgtgttgggataacaggcatgagccaccgtgcctggctgtgtaagacttctttatatattctagatactaggccctaatcagatatataatttcaaatattttgtgagttgtattttcacttgcttgatagcatcttttgaagcacaaaagattttaattttgatgaatgataatttatccatttttcttctgttgcttgcatatttggtttcatatctaaaagtttattggcaaattcaaggtcatggagacttagtcctttcctttctaagagttttaccattttagctctcatatttaggacacagaaccattttgagttaatttgtgtatatggtgtgaggtaggggtccaacttcatccatttgcatgagagtatccagttgtcccagcatcacctgttgaattgactattcttttccgactgaattgtctttgcacccttgtcaaaacatcagctgactatgggcttacgagtttacttctagactcttaattctattccattgatctatatgtttaacctttcaccaggaccacactgtttggattactctagctttttaggaacttttgaaataggaaactagtaattctctaattttgttccttttctagatggctttggttattcaagattccctccaattccatgtgaaatttaggatcagcttttccatttctgcaaaaaccaccattgaaattttgatagggattgtatggaatctacatgtcagtttggggagtactgctatcttaataatattaagtcttctgatccacggatatttttccatttatttaggtagtttttaaagtcctacagcaaggtttgcagttttcagtgcaagtcttgggttaaatttattcctaagtatttgattctttttgatgctattgtaaatagaattgctttcttaatttcattttaaattgtccatttctgttgtataaaaatacagttgatttttacatattgatcttgtatcctgcaatcttacataatttattagttctagtaggtttcttttttaagtgtgtgtgtatttcttgaggttttccaaatacaagatcatatatttgtcaatatacatatctttcatttttctttccagtctgaatggcttttatttcattttcttacctaagttcactgtctagaatctctggtacactgttgaaaagtggtgagaaaagacatccttgtcttgtccctgatcttagggagaacatcagagtttaaaatggaaatgcctgttatttctttggtgggaagaaagccagagccagaacttgtttggtggcaaacaagccctgggcaacctttttgcaatatatttttgcagcagcaaatgagtgctttctgcaaggatgctcagggtgctgtgagatcagggcctctaagaaagaaatgattctccatcagatgaatcagctcgctccctcagccccaagtcctttgctatgtgaacaaaacataaagccccttttctctgaccaacacaacaccctgcctgaagcccacagatcaagaggggctgctgtctttcacgtgtgcttcctataatgggcacttcacagctcactgaggagactgacagggagatggcaaacctattaggaaattctggcacatttataattccataagatgaggaaaactatttgtagggtcatggagagaagtgacttaccagctgcaccaatagtgccttgaagatgccgtggcctgactacgtaatgactgtcttagtcatgacaccgataagcttcaaatctacaccattacagtttgtacaacaggttggcttaatgaggttgatgcagatgctcaagagcagttattaaatcctcacaatgagactttagcaaatgagggcttcaacaagttgttgccagtaagtgataacagtggaagccactcagttgcatcagacacatgtgtaaggtgctctgagtgctagacgctggtacagaactccaaaagaaaatcaggcctcattgccaaagctcagggataagtctaaacagaaaggcatttatacagcaacaagaaagttactgggggctggggatgagggagggctggggtaggaggatactaaaatatttttctgaggtgcccaactgcttgtcttagaagaggctaaactgagccaagtgtctctgtttgtctcctccaccccctcctctacagctttacaatgttctctagcagaagcaaaaacagggtcactgccatcatagataaaaggatgggcggccgagcgtgatggcttatgcctgtaatcccagcactttgggaggccgaggtgggtggatcacctgaggtcaggagttcaagaccagcctggccaagatggtgaaaccccatctctactaaaaatacaaaaattagccgggcgtggtggtgggcacctgtaatcccagctactcagtaggctgaggcagggaattgcttgaacccaggaggcggaggttgcagtgagccaagatcgtgccactgcactccagcctgggcgacagagtgatactccgtcttaaaaaaaaaaggggtaagtaaaatgcacgtactgtgtgtaatcatgtaagtaaatattaaggtaagaattgccaaaatgagtcaaatgtgcacacacaaacataggtactgcagagtcagaaaactatacttttcccaggtttattattcacactgtctcaagaatgcatctactagaaatatattcttcttagaatattaaaaagaaacacttgagtgaaaccacagacttaacacagtcaggtgttgcttaaggtcatggctgcaagggcatagtaaagatttaatcgacactgccaatgatgccaagtaaaataatattctcattctaatgttggaatctaggttaggccccacctgcaccctatgttaccccagaatgaagtagaaaaaataagtacggaaaacacaacactactgaatttgggtaacaaaggtatttaacttactcctttggaaccataaaaacttagaaaagagatccgagagatcatcattcaatcttttaatttaacagacacggagaacggcatcaatcaaggccagaactgcagttaccagcaaggtttaaaaacaaacccaagcatcgtcctgttccttacaggaagggaaaatgttaattcagggtcaatgaagcaccatttaatattcgtgaataatgggcctcatatatagtgcacagtactattttttcaatttttttatttttttttgagactaagtttcattcttgttgcccaggctggagtgcagtggcgcaatctcggctcactgcaacctccacctcctaggttcaagcaattctcttgcctcagcctcccaagtagctgggattacaggcatccgccactacgcccggctaattttctgtattttcagtagagatggggcttcgccatgttggccaggctggtcttgaacttctgacctcaggtgatccacccgcctcagcctcccaaagtgctgggattacagggaaaaggcaccgcgcccagcctgcacagcactattttgaggacttacttagttttgaaacatgaatttttctttcatctcactcactttacctaataatcatttaaaaatgcaaataacaccttttaaaactatactttcaagtgaagtcaacagatgattgcttcagcttaaaaatatgcttccaaagataaacacgttaactcctactctcatagaagtattatcagatgaaggaactggctcataaatgctatcttcaaaataaagacaggtcttccaccaaagccatcttcttcggaaattactgggcatggggtgtaagggagtgtggaattgtgtgaggaggctgggggcggtgaggggaaatgcattagaaagatcttaagggggaaaaaaaagaaatttaccaggattccagcaacaaattaagattcctattcttccctgagaatgaacactagagaacatataccagctcttcgtggcttctgtgctcatttatctgtgatctcaactctgctaaaaaaaaaaaaaaaaaaagctcagggcttctaatgccatcacagactagcgtgccccatgcatttaaacatgcttccttctcatatggtgaaatcgggaagcctggctctcaggtttgggtgaaaatgagtctgcttcatggtactgacttttgccaggatgtttcccagcctatgcccaagaacagattaacaacaaaaaatgatttctgttcgttacttcccacaacttctggtttgttcccttatcagtaaagagattaattttagaatatgattattatccattcttttcattctaagaaaacacaaaatgcatgctctcttagtttattttcttacaagtaaaattactccacctgcacaaagcagcaaaactgaagctctcaacatttttgtgttctgcaaaaaaacagagggcaaccctgtggtcattcaattttgggactctaccgaccaaccctctaatgtgggtggaggcctggatgaattagaatgacaatctcccacccctcccatttagacaattcgtgtttagacaaagagctctcaagaatggctgaaatttgagagaacaatcccaacggaagccagctctatcaacctgcttatggagaaacctcaggccagatccactagcaaagcagcaataccaacaaacccgacactacacctgtcctgcccatcgtatgatgaaaagcccaccacatacaaatctcaccatggcagaaagcaaagaggtcaatcgacctctaaatggtggacaaatagcttgctgcttcaaattctaggaatacttattttacattttgatttttaatgtacatataacaaaactcattttaggggcctaaaaacaactttttttttaatgagatgctttaagtgtagatttttgagctaatgaggaaataggaggaggagggctttaaagataaaattccagtaaaagatacaactaatttgatagctgaacttgggcagatactttacctttcgaacaacaatttcgtcatctgtaaaatgggaatgaaaatgcatcatgccctgttgtactcttcaaaagggcaaaggagattgtaactgaaagcattttgtaaattccaaagttcataattattatttttattaaataacagcaacagttattcatgatcttattaaaatattaattttccaggatcatttgaaattctcaagtgctaactgggttgaaggtaccatgttagttgctgtgaggttctaaggcagcccctgccttccagcaatgacctgttaggggaagggaaagctactcatagctaagagtgaggccaccaagagcacagggctcttgcatgatggggacagcaggcatgccatgggaaccaaggaagggaagcaaataggtggcacaaggcactgggtcttgatgaagggaccatgctgcacgtgttcaactagactccagcacacaggaaaatggtaggtattttgttttaatgtcttattattaaaagcttctcttttgctaacatttctttagcccacaattacctaccaaaggatattttttccatgggagaacaaaagaaaaactgttgtttattgcttcttcagaaaacaatgttctctctaaaatgtgtttcagtaaatagcattaatagctgaacaatctgcaattaccacaataccacttattgttatgtattaaaaagaaatcaacagacaaaaagagattattccccacaaggagagcacttttctcacggaaacaaaaattgcaatttaaaatgcttttcttgacattatatccttctatccaagtctactctttatgaattataaaccacagtcatgatttaaatctcttatattcaaaaatcattcctctccaaatgggagttaatgtatcctccttccccaagtataactttagtacctgaaatgtctctagaagctattcctgtgtctctcagtgcctctgtgcctggagaaaaatgtaacatttcttaaagtcttcatagaactctaaatgagaaaagatggtcttacaggtcaatagctatattccaaagagcaggaaaatcccttctgcaatgaaatgtaccattgcctactgaaggcctaactatctttcccttcccaaagtcccagagtcatcagaaacccgtttcatggaataagcagcacaagccaaacaggctatgtatctgttcaccaattcatggatgcagtgacttgagtgcaaggctaggtagggctcaagctctaaagtgaatgttccctttttctgaggctgtcctagagcgtcagacagccttggactgaatactttagagcttgaaaggcttacaaacacagaacctatcacctgccatatttgaacagaaaactggatttagtgtctcctgatgatgagctagaatctacctattagtcctggctctgggtaaaacagtctctctcacacagcactgcttcagacatttgaaaaaggcaattatctgtctccatgcaccagcccttttccatgcaagctgttctctcagccatcctgcttcctcttagctactcaggcagtgctcatgcaagaagtggaacctgagcccccttcctgcctcctttcatacatacagtgccttgggctttgcagatgcaggccacacaactttctactttgggcttccagacaaaattcatctcagataattttcatgttaacttcagaattaatcagaacgttccatgttttatttcttaaactgatttttttagacagagaatttagtaagctgaaccattatgaaattgtaccccctttttgaaaactcatttaactcaacctgaaacattgactctcttaatctccctggttaaatttttgtatgcatttattcccttggttaagctaacagagtgagactttcatactgtctttgattactgagttgtgtcatttaatttatattacctagctcttttcttaggacaatgtcatctgcagaagtactcctttagggcaaggtttctcaacctcagcagtactgacatttttggtcataaattctttgttgtgtttctgtgcactacaggatatttaacaacatccctggctttcacccaccaaatgacagtgcactttatgacaaccaaaagtgtgtccagacattgccaaatgttccctggagggggcaaaattcccctgcccctcaagaatcactgttctagggtaatgaaagttgactagctcaccacagtagaaagttaatgcctgccttgaaactgatagttggagccaaaattgcaaccaaagtggctcagctcagctgctttggttacccattcttccccatgatgctgtgtagatttggaatagccagtctcagaagaaggtctttttttttttcttccattttctatcaatcaatatatctactgagcatctaccctctctgggaaaagacagaatgcactccagtgactctattaaaaaagattccggtgatctgggctctgtgacaggccacagtagagtctccttccagagagaaacctcagagcaaaagaacatgttctcaactgaaaaatgtatgccaactgatacacgatatcacacggtaacagtttactaagaacaaaatctttccttttcccacatatactgagagttgctatactatttttatgctttatttcacgtagcatgtcttattagataccggaagattttgggctaaatatacataattcatattcatgtctgataacatttacttgaaagaaagtctttacacctttaaatccaacaaaggaaaccaaacaaaactgtagtttctggcctgtcaggtagattttcttctctctggatcagcctccatgctatcatcttacactttttaaagctgtgaaacaagttcactgcacatgtgttaaacctcataaccgaaacctctgccatctgttacctcctacatatttttactttcctcattgaggtacaagtgggctctgtctacagattaatgaaaataattattgattctacagctataaaaaaaagaaaaaatatctcgcatttatttttggtgcagtcatctatctgaagtctttatggcgattgatagctgaataaagttataataaaactttcattgataaattttgatgaatctgtggcttgtccattcccacaaaaccttgtggaaaacactcggaaggcagtggatgctacctgatggtgtaacgttaattatatgacagcttctgtattttatcactctgaatttgtacaataagcacaaacaggaattatgattaacttaacaatacatgtcaggagaggactgtcatctctcacctgtccttataaatattatccttcaatcaaacctaagtcaaacttggaagttttgtttattgctacagtaaactccccttatattcaataatatttcattaacttgagtaaagtaaattcaggtcagaagttgtatttttagaaaaataaaaggacttgtttttaagtgctacattactttcagaaataattagtaacaaatatatgtcttggctaacaaaaacatcaattacagagccctttagatgtcccattttaataattataaatacatttacaatttgcataccaactgcttgaattccaacagaattagaaaatatgttctcttaagtacagagaaaatgtccctggaaatctttcctgcacatttctaattcctaacaggcaagaattctttggggacaccccttggtgtatcctcggatgcacccatttggcctgtcctatgctataatgtccaaggtgaggaagggtcatcaagacatgagtcgaaacttacagtccctttatcctatcatgcccacatgtcttccttttctcaattcatcttcttgcctttctgaaccaacatttgccttgacagataatgggaatcgtgccaggacactactttctcaggatgcttaccaatcagtactacatcctacctctccaacatatttctcacacacagacaaacacacacacacacacatgcacaaaacacatatgtgcatatatatacaaaatatatacacatataatgaattatacacatagacacacacacacacaaaccccatctgtgcctcagtccttgttagccctcattaccttgcccctgggctattataataatttcctttctgtgtttgttgtcatcattctttcatgattataattcacccccactttatcactgtggtttaagcttcttaaaatgctcttgtggtcatgtggagtatcatgctcaaaaaccttcaacagctccccactgtccatgggatgaaaactactttgaatcaaggctctctacagtgctgcctggattcatgaccatatattatttctacgcatatatctggcattaaatcaaagccactctagtcattgttcctgaacacagcctgaaaagttctgtatctttgatgtgaaactccatcatgcttcttgtcctgctatttaaatcctatccattcttgaaagtcctgctaaatcccctctcctttgtgagctgctttcaaatcaacttagctaaaaggatattcaacagttcaattttcataacatgtatatcactacttatttggtcttctgcacaagttgatggttagtacagatacttgtttatgcatctcacactctcataacctgactaggtctttaccatggcaggaaaaaatattcaacataaaaagatcattgaactttgtgccacatttaggaaggagtgatgtgaccctaataataaagtgcctaaaaataaatcagaggatctaagaatgcttaatgggaaagggtctgagaggctctctagcccaattcattcacttgactacttgtggataggtgagggccccatggccagtgagtgacaaagctgagtctagctctaaggtattttagttcccagtatcaggcctgccatccatgagagtcatatgttattcttgaaagtcaatatattctgaagccatcttatatcctgaattcttggaagtacattttccaattcttagaaaccttaggaataaggccccacattagtcctatttttacttgttgtataaacctatagttttttttaaactgtttttaaatgaagctttaacaaagttagccttctaaaggtctaaagttcctctactgatacacatcaaagttattatttcatcctcggaacatcagttagatctttaaattcacaaataagtactttatctgctagtgttgagttaaaatcctataaattaaaaccttggtaaaatcacttgctgtacagaatgagcactttagagacatgtattaaaattatttccagggatttgagataaacaaggcctccaatttgccatcctaattctttacctttcctggaactgaatactcacttatgtttcaccttaaatatactttgaaatttatgtttatctaacatatatggttccatagtaacaagtctaaattttcagcaaagaacaattctttgtctgagaaaaggtgatgcaattattacatatgactgcatgatacaggctgtctggggttattaaaagagtcaggtatggccaatttacaagtatcacccctgcaccttgctttcaaagctcactgctgagtcttaatgctcactgaggggcctcatgggatctttttacaaacgactgtttattattatattattccatcatatacctcatgagagggggttgtaacacccgttaagaaaatcatgaactactttgacttctgtgatagaatactgctctatatatgatgtttaaaattatggttttttttaacattgatgtgacaaaacgttcataaaaatgtggagttaaatgaaagcaaaatgttcctacaagctaaatattattgcctacaaaataagtggctaaaattttaaaaatacaaaaattaaattaatgctcaagtgcattcagcaactgaaatatgaaccagtgttgatcatgtattgccagtgaccagcacagcactttgcagagcagttactggctgagccagggtcttacttgcaggcaagagaatccactgttttgagattaagaagaaagagacttctatgagggtgttagatggtctggagaatgtctagaagtgccagggaaccaatcacaaatctccacagccaggaaaaagctggtaagcaggaacacccagccacatcacaaggctgttccagcagagcccactgtctgctcatctcaacagtgatggtggtgccggagcagaacctccatgacaggaggacccagatccccctgtgctgctgcccaccactccccacatctaccttcaagtgccatgttggctggtgtctctgctggacagaacctgggtcaatgccaacccagctgcaaggagtctgggacatgcagtgttcagctttctagctttccttgtacagaggctcattgggtggggtgaaaagtgagggaaagtgagccgatagccatggacacaaaagaagcatttctggatcataagcatacatgggtaaaacaaatgtatcaatcggtatgtctgtctacagcacagggagtggttatttctccacacgttgtaaaattccacaatgcctagttatgttttttagtcaaatcattatgttcaaagtaagaaaatgtatatggagaaagaaaaaaaatcaacactttaagatatcagaaataaatgatggtgttgctgttcttctccttacccttaatattattacaagagctcatgcttactaagggatcatatccatgatccagactgaatgcattacatgtttttacctctttcaagtcttcaaacaaccctctgaggtaggcactattattatcctcattcgatagataagggagccagagcacagcaaacccaaatgatttggctaataagtaacaaagccaagacaggaaatcagacaagctgacttgaggtccatgctcttaaccaatacactttatcacactctattacactagatcttaactttatgctgttatgatccaaatatgttacttcagggcagaacaacaaacacttctgcattggagagaggcctcatgcttttttggtgcattataaaacacaatattatagatgaaaatgacaaagacccacatttcccaaaatgtctatatgcatatttgcaacaataattttacattaatgtaggctttgcatttaaaagagaatttaactttgatgtataacagacaaattacattaagacattaaatctgtaagtcattgttaaaaaatagctcacttattttaagcaaagaaaaccttccagtctctgatacatgttcttacaaacatgaaaataaaattcctttcctcaactgtccttttccatttcacacatattgatctttccatctgttttaaataatcatgaaattaataaaaactgtttttaataaatccaaatcataggttctttcatgtcaaactattttggggaattctgatgtgaaaaagctgcttaagtgttaggaaaaactgagaacaacaagaaacagctttagaagagaaactgaaggatgatgaagaactgagaaggcaactgtggaaaggtctttccaggttggggcagggtagtttaataaggaggattctgaagtggagtaggaccaagggcagagcccaggcaaaataaaacggaagggagaaacaacatcaaggctgttggaccaatacgcttgctgtgaatcaataaaagaaaacatacctggtggaataagccaagcctgtatgtgaattctaacaggctttttagcctgtggcactgggcaaaagttttagatatttttttgaagtttcattatttataaaatgggcctcaggggcctgggtactatggctcacacctgtaatcccagcattttgggaggccaagacgggaggactgcttgagcccagtgagctatgattgtgtcactgcgctccagcctgggcaatggagcgataccccatctctaaaaaaaaaagcaataataaaataaaataaaataaaataaaataaaataaaataaaataaaataaaataaaataaaataggccatggtatttattgaattgaattgcagagaagattcaatagtacaacatcatgcagtccccagcacagagtccagcactgtgagtgctgaagaaataaatactcctaagcaccatcaccagcccaccctcagacacaaagcagctgagcagagggaagcgtactgggagactccttcacaggcaggccgggtagccctgaaagtcacgccaaattttcttcataatttatagttattttggaactgtttataatcctaattattttgtaaaccactaacatcaatttttaaaaaaaattcattgtcaaggaaaaaataaagccatttcaaaccatgttttcgatcacaccaatcaaccacgaacccatgttacatatgtaccgggggaaatactacttgataaattcattgtgttagtattacataagttattaggataaccaaaactggttaaaaatactaaaaacagttgctttggaatgcactacatttttctggctgtttggtatatgtattattattttttaagatacaaatggtcatgtctgtttacataataaatttgctatcatattagatgaaactataactttccaggattgccagagaacacaactcatgagacatctactttacaaattgttttttaaactaaaaaatgtcttcaattactatgaacatcattatgtttgaaaatactttttagcatcttataacttatttaattcaacactttattggtcactactgacataattttgataccttcagatttaagaaagaacttcatgaaacaaccaagccatacaaagcataatgttcaaaggcccatgaaccacaaagctgcgtcgtgcagacaagtgtgccacccagaggcaaaaggaagaaacccaccttggattttatttgtgagacaaaactgataatgttcaattttaaacaattatttatgattatttatttaaaaacacaggacatctttcataaggttctctctgcataaataaatccttttgctgctaggatacataaaagtgtggccctttgagaattctcacaaaatagaaagaagccctgagatggtaccagtcacaggtacatagtttgttaattaaaaaattgaatttaactgtattctctaccataaatgctttcttttctttttataattaatataacatgtgtttccagaattacataagttctgaaacaaccactatgatctatttagacgtgtggatcaaaagttaaactaattaccagagacatttcttaacttaaatgaaaaaaagtttctttcattaggtcttctgcgtaatt

SEQ ID NO: 59087 - DNA, 532 bp, Homo Sapiens
  misc_feature (119)..(119): n is a, c, g, or t
  misc_feature (176)..(176): n is a, c, g, or t
  misc_feature (180)..(180): n is a, c, g, or t
  misc_feature (188)..(188): n is a, c, g, or t
  misc_feature (345)..(345): n is a, c, g, or t
  misc_feature (428)..(428): n is a, c, g, or t
  misc_feature (485)..(485): n is a, c, g, or t
  misc_feature (511)..(511): n is a, c, g, or t
acattcatatgaagtctttttattgatcttcctttgcaatttcacaagaataaagttgagataacttacaaaaacaagcaggattgcaatcaaattgctcaatattaaggggccacgtntagcatctggacttgcttcattagttctgggatgataacttggtgtcaataaaaggngtanagtggaanagtgtggctattgatctgtgggtctttaaaaattaatgttcctattacacagggtctggggttgagtgaggacaaaaggagggaaaaggaagagctaagggatgatgagaaactcatattagcttcttagaattaatttgtttttcaggcaatccanaccttctttgcaatcatgagtattttaactcatgagtatttaattccttaaaaatacaaactccccaaaacccaggtcagctnttaacctagggatgacatttactttggggacagcatgccccatttggttaacccaanaagcttttcagccctgctttgaccanttcctggtcaaaaatcctgcc

SEQ ID NO: 59088 - DNA, 2629 bp, Homo Sapiens
aaaagaaaaaagagagtattaaaatttctcattgtaaaatctatattttagaatcactctacaatataagcaaataatgtgttttttactgattacatgccttttttttggggggggggggttctttttttttgagacagggtcttgctctgtcgcccaggctggagtgcagtggcgtgatgagacttcaatgcagccttgatctcccgggctcaagtgattctcccgcctcagcctcccaagcaactgggaccacaaggtgtgtgccaccatgcctgggtaattttttgtttttttgtggagatgcgggtctcactgttttccaggctggtctcaaattcctgggctcaagtgatcctcccacttcagcctcacattgttgggattacagtcacgagccactgtacccatccatatgtcattctttagacacactacttactaaatttctctttttaaaggatatactgaatttccggttgagccaacttaactgctaattttctattttagctttaaaacattgataagcaacatgaagcaatctagaacttaacctttaaatggctttattaaagaaatccagctatgaaaatcatgcagaaatgattatttacaaacaatcctaccagcacataagaaattcttcctctattctgaaataccatcttctcacaatatactttgatgttatgaatcaatgtctgttctcgaacattatttgtctttctccattaaacaataccaaaataaaatttccagcacaactaagtattgttgacgataaggggatttaaaaaaaaattcttttaaaacagaagcttatatacaacttagaatctaaaaccaatagatttatggtaaaccttaagactgaaccaaaacaaacaaaaaccaaagttttaatcatttaaaaatcatgtttattgaggtacaacttacttatagtaaaacctgcccttttcagcatatagcactgagtcttgacaaatgcacagttacgtaccaccaccgaccaaggcctggcacattttcacctcctcaaagttctccctggctgcttctcccactccttggcaaccgctaacctgttttctgtccttatagttctgcttttttcagagtgtcatataagtagaatcacactgtacatagtattttgagtctgacctctgtcaactggcataaggcatttgagaattatccatgttgctgtactggcagtgcattcttttttattgctgagcagtattcaattgcatggctgtaccagtttattcatttgccagttgaaggataactgagatcttcctcgtttttagcaattttaaagaaagtttctatgaataattgtgtacaggtttttaattaaatgttttggagatataattcatataccacataattcacctttttaaagtgcataagtcactggtttttaatatattcacaaggtttgtgcataggtttttgtgtgaatactggttttcattcctcttggataaagatttaatttggtattatccttccagacacctttctgtgttttcatacgtatatatgtatgacagtttgaccttaggcagagtagcattttcaaaattttacatggggaaattttctagagttaaagccattttatttttgtgttctgtctggttttatctgcgtgttatttacaatctgctgcgtaacaaattacaaagttagtaccttaacacatatttatttcacagtttctgtgggtcaggagatcagaaatggttctatttcaaggtctctcacagggctgcaatcaagatgttggcatggctggggtctcatctgaaggctggactggagaagaatctacttccaaacttatgtggtagttggaagaatttagttcctcaaggccgctaaactgatggcctgtgttccttgcctatgggatggtagcttgcttcaacaaagtgtgcaagcagagaagacagagagtccgctagcaagatagaagccacaatctcttgtaatctatcatttttgctgtattctactggttaaaaataactcattaggttagcctactggctctcaaggggaagagattatacaaaggcatgaatttctggaggagggaatgagggcaaagaattctgagaagtctgtcttccacaatctgaagaacttctagaaagtaggaggaagcgatattgcttagggatggacaacttggcactggttatgtatttcaagtgaggtaaccttgttcccaagaataaagagaaccagacgactgtaaacatttccctaaactgaaatgcagactgttgtatgttcccctgaaatgaatggtgtaagctgaatataagatttttgacaaaaattttgctgtgttctcagatctggcaggcccctgcccttgtgcaaacaatgttcctggcagctattcatctccttaggtaaagaagaattggagaaaagctgtgctaagataggatgcatttgctcttgccttggaaggttgttttctgataaggttctatatcctctgcaaatcaaatcaggcacttacagtgtgagtatgcattctcttcctgccagtctggagatgatcaaaaagcctataacaggcttggcctattttcct

SEQ ID NO: 59089 - DNA, 646 bp, Homo Sapiens
  misc_feature (453)..(453): n is a, c, g, or t
  misc_feature (471)..(471): n is a, c, g, or t
  misc_feature (502)..(502): n is a, c, g, or t
  misc_feature (564)..(564): n is a, c, g, or t
  misc_feature (587)..(587): n is a, c, g, or t
  misc_feature (619)..(620): n is a, c, g, or t
  misc_feature (625)..(625): n is a, c, g, or t
  misc_feature (630)..(630): n is a, c, g, or t
  misc_feature (639)..(639): n is a, c, g, or t
aggaaaacatgttctttaataaacataagagatagtcaagtctaaataaaataataatgataataataacagattctacaccacagttgtatacacttccagtgaagctttatgcattccattctgagctcctaataccaggtaaacacgaatcataggtggaaatatgccatgtttagcactagaagtaacatcacagtttattagcaaaataaagcagaaaatgatcaaaatgatcaggtaaataaatattacaacatataatgtactggtgatgaagctgcaataaagtaatataagtgatgtttacaattttttttttttttttttttttttttttactgggaaggctagttgtaaacataaacattctcactgaactactggccccccaaaacctaacctatctcacaatcaataatcatcttttgctataaaatcataaaaacttgnactctggggctcttttgnctgggacagcttttctactttctgacatctnttgaagtctttcttctcaaacttcaagctcaggctttatctcctgccaaaacctttcctgangctttcaggttctgttaaaaccnggttctttctttttttttttttgaaacggagnntcctntgtgnccagctggngggcagg

SEQ ID NO: 59090 - DNA, 579 bp, Homo Sapiens
  misc_feature (69)..(69): n is a, c, g, or t
  misc_feature (93)..(93): n is a, c, g, or t
  misc_feature (174)..(174): n is a, c, g, or t
  misc_feature (176)..(176): n is a, c, g, or t
  misc_feature (369)..(369): n is a, c, g, or t
  misc_feature (540)..(540): n is a, c, g, or t
  misc_feature (547)..(548): n is a, c, g, or t
  misc_feature (550)..(550): n is a, c, g, or t
  misc_feature (554)..(554): n is a, c, g, or t
  misc_feature (577)..(578): n is a, c, g, or t
atttaaaaattgcagactttatttgcatttcctcagcttttctgctaatgtcttctttctttttttganacagggtctcgctctgtcacctangctgcagtgtgatggcgtgatctcggctaactttgcaacctcttcctcaatcctcctgcttcagcctcccaagtagctcanantacaagcgtgtgccacacctgtctaatttttgtgtctttttgtagaaatggggtttcaccgtgttgcctaagctggtctcgaactcctaggctcaagcaatgcgccctcctccgcctcccaaagtgctgagattacaggtgtgagccactgcgcccagcctaatgtcttctttctgttacagggatccagtanaagatccacatctggagatcttttcctttctttatatctatcaccgacattacctactctttaaaaattttgtaaaaggcataaatttgaaaaatatatcctcattaatctaaatcaagtcattgatacaactatttaacaagaccccggcctgcttgttttattaacganttggacnnantccnctttacatatataataattccgnnt

SEQ ID NO: 59091 - DNA, 113196 bp, Homo Sapiens
gatcttctccctaccccagaaccctctcatatcacagtccacggagggtctgctaagggcacactcaaggccacacgcaggctggggcacactcgtggggcacacacccctctcggcccaggtgggcgcccgaccagcttgtgaccagtctgcccctcactcccatcccaaaatgcctctcacacaaaatggccggtcccggagctcagcgggtcccttgttcagctgggatgggagagcaagcgccctggcgcggggaggctgtgcacaccggccgcacaggccgcacacgcagcgggccgtgcaattccacatgcgaacacccaggtgcacacggacgcaggcttcggccgccccccgccagccctgccccaggaggcagccgttccctgagcctcgcccgggaagaggggacagccccttccaggcccagggctgggggtcccaggtctgccgcagcccctcccccgggcctcgctctgccaaggaggggtcctgagcccgggatgtgcacgggggcggccggcggctgcagagatgggacagcgcaggagctgagcgcaggagctgagggggttcgcggggccagggaggggcgtcggcgccgagggggcaggacagacagctgcgctcagcccgggctggggtgggggggtcatgggagggcccctcccccatctcaggaacccagaagctcaccctagtctgagggagagcggctcgggaggatggcggaggacaggccagacccctcccccccgccctcgcttggtcgggcggccccagccccgcgggtccccgagagtcccggagagtccagacccagcgctgccgccgtccctccccggccggccctttgttcggcgcagaggccgcggggaggggcctcccaggctgaggagggggctggggcggccgcacgtctctgtcctgcgggcctggagcccccaccccgacctgagcggccccgaccccggaatccttcctgcccgcgcgctgtacaatcgctctccggtctcggcccagcactcccgccggggagcgccggccccggacccagacccaggggcagggagccaaacccgccgcagccagcctggccggggtcgccgatggggtcgccgatgggggtcgccatgggggtcgccacgggggccccgccggccactcacacgtaggcgtggtagatgaacgcccagccgcgcggccgctccagcacgttgtagaggaaattctgcagcttgcggtagaaggcgttgcgcttggggggcttcccggcgcccgcgccgcccgcgcgaggtttgctgaggatgctgccgcgcttgggggcctcggagccggcgatcagcagcgccccgtcccgggtggagtcgggcgcgccggggtccagccccacgaagcccaccttcagcttcttctccccgctcgggccggggtatacgccgccgttgcgcgacttctgcaccatggtgcctggcgggaggcgccccgggtcgggctcaggctcagcgggggcggagcgcggggggcggcgcgggccccagcccaggccccccggccgggagccgcatggccgaggcggcggttccgcactcctgccgggcttgggccgcgcgcggagacgctgcggccacctcgctccgcgcgcacctcggcgcctggcccgcggccgcgccggctccgcccgccgcctcgccccgccccgcgttaacccccgcgacgccagtcgaaggagaggggaggagaagagagggaggggaagggaggggagagggagggacggggaggggaggggaggggggaaggagaggagaggggaggagagaagagggaaagggaggggaggggagggagaggggacggggagaggggagacaggaggggagggggaggggaggagaggggaatgggaggggaggagagtggcggggacggggagaggggagacaggagtggaggggggagacaggagtggagggggaggggaggggggagaggagggggagtgggggagggggaggggagggcagggggagaggagggggaggcagaagggaccaaggcccgcgggaccagagctctgggctgagcctgcccaatcccccggccatgtgcacactgaccctgcggtcacctttgagtccggtagtactaaccaagtggacctgcctggtggccccagcgctcctggggtcccagagcggtgcccagccgcctgagcaggactggagtcttctcagctgggccctgggagtggacgcctccgggaagggatgggggtaggggctctccccaagactctgttagggctcagcccatggtgacctcatgctctcggtgtcagggttgcccaggcagtaggaccccctagaccccagggtgtgtgcagggagggtctgtggaggctggaggcaccctgcaaggaaagcagcccaggggaaagggggtggccacagaggccgggaggcaagaagaggagcaagggccatggggtgggggatgggagagagtcactcctagagggccttgaagccccccaaggggcctggacttagttatgcagaccccagaaggggcctgtggcaggggcagggactggagggtggccccagggcagcagacaggccagcaggaagcccagtgccacacctcgggacaaaggaggcagatctgtgcctcctggacacagatgggacggtgtttccttgggggcaagtgcgcggaggtggcctcccccctgccggcagccatgtgtcctgggaggggtccctctggagctgctgctgggagaccaagggacccctgcggctcagtgctgcccgccctgtgaggtgccccgccactgggccttcctctgcacatccaggaggggtgtcatcttcgagtgcgtctctgactacatccagcctgtttgcacgttcgcctggcaccatgggttctacccagagaaaggccctctgctgaatcgctggcgccgtcctcgcaggtgacctgctcataaaacagccctaaccctggtgcagagtgagctcttgagttgtgtttgccctttggtttccagagctagtggccacggggcctgtttttgttgttgttgttttgtttttaactaggctgaatacagaagggtcggtgcaggcagaatgctaacctgtacgttatccaggacgttggggatagacggcaacttacacaagcttgtgcacatccaggggtactttctggatccccgcctccctgcctctgtgcccacgcattggctgtgattaccagcatgaagtgggcttgccccaagcggctgcggtttctctcgattgttaagggaggaggcaccagcctggtgctttcaggggagggagaggacttcagtatgcagaaggaagagagcaccgtggcatctccctgcacacgctggctggtgccgctggtctttcccactcaccagaagacccgagggagcagccgtagctcaaaatgtaaaccctgcagggctggggcccctcatcctgtggggggaagccccagactatccggtgcccctcggcagtgcccgggctacacgtgacctctcctgggcaagcagtcatctcaggtttgatgtcagagcccagtgggacccaaggtcagggctgatccacagaggatgaaggaaaagtgaccccagttcccgtttgagcagatgcaccagagctgagatgggagcaaggattaaggtgctctggtgtccaggacattgggagagacaaacctgttcatcttatttttcagaaaaaaaaggggaaaaccctgctgaggtcttggggagccatcggctggcttcacagcctcctgggggtggccgagagtggcatcccccgtggggatgccgggctggaggggccggctcaggatgcaggtggagctttgcaccctgcagctcgcggttctcccgtctacaaatggcgttggctccagcagctttgccacaccttggaaggttctggaaagtgaatcctgcatcaaggcttgaaaatccttgcttcctcctttgtttaggatgtcctttcaaagagctagctcattaatcatttatgtttttaattttgtgtcttgcacacccacgggctacattgtcagcaatctggttacccgcatgcctgccccctgtcccctcctctgcgcccaggcaaagtgggtcgtgaaaatgcccagttggggtaaatttcatccaagcaggaggaattccatttatgtaaaaatagatgggaaaagcgttcaggctcaaacaatctttgccaagaccgcatcgacaggactccagagaggatgagcagaattcagacgtacgtggtgcccagctccagcggaggagacagtcagtcttcgcccaggcggccagggcagcagcggattccacgcgggcgctgtcccttcagcacctccagcaccatcctctccccggaacctgcaagcccagccccttctctggtctcctccaggcaagtaacctcaaggcctccccagtgtcccacgtcactgggctgcactaagcgaccagagaacatgaagattgtactgccagaactggctgctcctgccgatcaaggccagctcatctgtccccaaagtcctctggtgggctccctccccagcagaaagcaaaccacaggggctgtgaccgcctactgcccgggctcccccgggcttcccgaactgtcctccctggagcctggcgcagagaggggcccagagtcaatggttgttggaggacaaactgaagcacatctgggtcactgccagggagaacccacagggtaaccctgcccatatggtgctggtcacagagcagactcggtgccctccagaacccacgcctgtgctctccctcaggtgcaggtgcagtcctgctgggtcatgactccagtctcacaggctcggcactggaatggtgggaccaaaagtgaaaaaccgaggccaggccaggcggctcatgcctgtaagaccagagttttgggaggctgaggtgggtagactgcttgagcccaggagttcgagaccagcctgggcaacatagaaaccctctctctacaaaactgcaaaaattatccaggcttggtggcctgcctgtgatcctagctgcccaggaggctgaggtgggaggaccgcttgaatccaggaggtcccggctgcagtgagccatgatggcaccactgcactccacctttggtaacagagagagaccctgtctcaaaaagaaaaaaaaattaaaaattagctgggcttgctagtgcatacctgttgtctcagctactcaggaggttgaggcaggaggctcacttgagcccaggagttggaggctacagtgagctgtgattacaccactgcactccagcctgggcaacagagcaagaccctgtctcaaaaaaaaaaaaaaaagaaaagaaaagaagaaagaaagaaaaaattaattaattaaattcaaaaatgagggctaggagcagtggctcatgcctgtaatcccaacactttgggagtccgaggtgggtggatcatctgaggtcaggagttcgagaccagcctggccaacatggtaaaaccccgtctctactaaaaacacaaaaattagccaggcatggtggcaggcacttgtaatcccagctactcggaaggctgaggcaggagaatcactcgaacccgggaggtggaggctgcagtgagctgaaatcatgccactgcactccagcctgggcggcaagagcaagactccgtctcaaaaaaaaaacaaaacaggccgggtacagtggctcatgcctgtaatcccagaactttgggaggccgaggcaggtggaacacctgaggtcgagagttcgggaccagcctgaccaacatggagaaaccccgtctctactaaaaatacaaaattagccgggcagggtggcgctcgcctgtaatcccagctactcgggaggctgggaaaggagactcacttgaacccgggaggtggagtttacagtgaaccgagattgcatgattgcactccagcctgggcaatggtgcgagactccatcttaacaacaaaaaacaacaacaaaaaaaacaaacgaacaaaaaccccaggaaaccaagcatgggtagtgacttgagaggcatatgagcttcctctggccgccctcctgtgtggggccgtcagcagcgggatcggggaggcggggactgccactgtgagtttgtgcaagacggctacatggtgctggtggcccccgcgggttgtggcccctgctagaacaggccagattttatgctcttttgacgctgtgctgtcatgggtgggatctgtgcccaggtgctcagcttcacctgcgttctgagggcctcggcaccagtgacaatagcccctgcggacactggaaagcagggcctcccaggccaccaccccgtgcctcccagtggaaatggagggagctgcttccccgtcactgcgccttcagaaaaacagacgaccccacagaggcctggaggaacaagatttaatctggggaaatgaggagatgaggagagacaggttctcagtcatctcacctgggcccgtgcctcccggtggaaacggagggagctgcttccccgtcactgcaccttcagaaaaacagacgaccccacagaggcctggaggaggaacaacatttaatttggggaaatgagatgaggagagacaggttctcagtcatctcacctgggccagagctgctgcgggtttaaccctgtaatttgggcgacaggaagtgcctccccagacagggaggcccagcccccccaaaggaattttacattattaggaggaggaaaggctgtatttatccgcttgcgggggagcaggggagtgaggaaaagatttaagatatgaaagcattgattttttttaacatcttacactaaagtcaataaaaatttaatttacagttttttctaaaggaccaaggctctcaataagcttccctagcccctggcaagccggctaattgcatgagggagttgacttgtacttcccagccaccaataataccgtcaattgaggagcccgtggtcagctgtgacggctggggagctacggtggctccggaggcatccggaaagggcagaaatccacctgtagctctgggacctcgagggaactctctgcttgatgctgtgccgtggcatccccaaaccccatatgttgtcatctctggtccacaggtgtcacaggtggcctcccacacgccccctcctatgccttcaggcaaatggagaagctgtggcaatcgtccccgttctgtggcagatatatcgtgaggaacgcaggcgccacgctcactcgtgggagagaccaggccccaccgtggatctacacatccagactccctggcacctcgacgctacccaaatgctttcctcatcaaggcctcctcgctcctgagacctggccctgccacacgctccaagaccaccgacccctctgcccccgtcctcccttcctgggcacacggccaccccgacatccctgagcaggcaaggagctcttgcatttgctgtctcctctgctcaccaggatggcagacactgcttcttctcagggaggccctggcgcggggtcccctccccaccttctctggagctggtcctcatcccgatgggaaactgttttgcctggcgctgctgccccactgcacagagcgcacaaggtgtggggggaggggtgggcacagacactcacagccccacctagcccaaggaaggtgcatgtcaacctgtcagatgacagatggccactttgacctggggctggacgtcgctggagcccccagccagatgtggcctcagtcacaggcctggggcttgtgtggctcagggctgccggggagaccccaagaggacatgggcagctggagctcaggactagcggagcggccagacgtcctgcccatgcaggctgcatctgtgccctggctgcccacccaccaacgtcctgcccacgctcaccagggccttgcttggccagatgtccagtaggctttgggcggggccatccagccttggcaaggcccatggactgtcacagccctccccaccccacatccaggacaaggtcatctagcgccacaccaggtggatggttcagaaaggctgggttctccaagctgcacaccagaggctgcacagagctgaagtccggcgagtcccaaggctcccagggcggcccgctgccccacaccctccggcaaacacgaaggcgccaccctcggcacccagcagcatctgcctcagcccctgcagagggcggcgctggtgtgggctgcagagagtatggcccgcaggcagccgccatgggcctgcccgagctgagtggctttcagcagaccaggcggccactcaggcctgcgtggactggatgtgtccccagaatccacatgctgaaaccctcactccagtgtgatggtgttaggagagggggcctttgggggtgactgggtcaggagggtggagccctcggaagaggaccagcaccctcaggggaagagacacgggcgctgggttcccttctctgcttcgtgccatgtggggacatgggaaggcatcgtctgcaagccaggaagccggccctcacagaaccgagtctgcccgctccttgatcttgacctctggcttccagaactgtgagaaataaatttctgttgtttaaggcaccaagtcaaagttactctgttgtagttgcccaagtgagacagaacctcatgctacccagacaagtggagagagtcagcccccaccccacgggagggtggggatgggagcgagacagcgagagccttattctgagagggcgtcaggaggagggcaggaaggtgcccaggtgagtcaatttcccggcttggacacgcccctcttccctggtctcacacaggaaggtgcccaggtgagtccagttcccggctcggacacgcccctcttccctggtctctctcgggaaggtgcccaggtgagtccagttcccggctcggacacgcccctcttccctggtctcgcacgggaagtcgcccaggtgagtccagttcccggctcggacacgcccctcttccctggtctcgcacgggaagtcgcccaggtgagtccagttcccggctcggacacgcccctcttccctggtctcgtgcgggaagttgcccaggtgagtccagttcctggctcggacacgcccctcttccctggtttctcacagatcctcccactggttgaattgaagagagcatgatgtgtccatccctgcggctcggacgagctggccccatcctggagaccagccttttgcttaatcacacttcctggcatcccacctacagagatgaaatccatttaggtcaattgctctcacccaggggttttgttcccaagggagcatctagagagtctggagacagttttggtcgtcacagcagaggggcagatggtatggcatccagtgggtggaggccaggggggtgggggggcaccaagcaccctgcagggcacagggcagcccccacagagcacagcgtcatccagccccaatgccagtcatgctgacattaagaaaacatggtgtaaggccagtcacggtggctcacacctgtaatcccagcactttgggaggctgaggtgggcgaatcacaaggtcaggagttcgagaccagcctggccaacataatgaaaccccatctctactaaaaatacaataaattagctgggcatggtggtgggtgcctgtaatcccagctactcgggagactgaggcagaagaatcgcttgaacccagaaggcggaagttgcagtgagccgagatcgcgccactgcacagccagggcgacggtgcaagactccgtctcaaaaaaaaaagaaaacatggtgtaagttaacaatgtcctttcttaaaatgcaaataggacgggtgaggtagctcacacctgtaatcccagcacttcgggaggtcaaggtaggtggatcacctaaggtcaggagttgaagaccagcctggccaacatggcaaaaacctgtctctactaaaaatacaaaaattagccgggcgtggtggtgggcacctattatcccagctactcgggaggccaaggcaggaagatggcttgaaccctgggagcggagattgcagtgagctgagatcgtgccattgcactccagcctggcgacaagagcgagactccgtctcaaaaaaataaaaataaaaaaaaataaaagcaaatagttctggtatgttagccattcacattttagcatgaaacagcataaataaatggacttcctcccaagagttcctgaatatgtaagccaagggctgagaatcttcttgagaaaggagccaggagtccgggcactgggtgggggagcacccaaggagtgaggttgggtcggggcagcagtggagttcagcaaaggaatcctgggcgttctgcattgctggttcctagcctgatggaaaaatgctgcttttacatcatcgcaggacactggagccattgctgtgtttcactcactgtgagcttagtttgtgtggctctgggcagctgcaggatctctccgcacctccgcctctttacctgtgatgtgggggtgctgaccatagatagacaattgcggtgatggaggaagggcgcaaggtttgtaaagagtctccagcggtggcaggaggaggcgtcacgtgagcgggaaggtgaagatgctgagtcagctcctggctgccccatgggtaccgcaccccgctgtgtgccacccgcctcacacccaagatgaaggcctgggtgtcgggagatgcagagtaaagacagagcagtgggaggcagttaaggcccctaaagtgccagaaacccccacccctggaggcagccacagcctctggggagggcggggccacagggacccttttatacttaaaggttcctccccacaccctgaagggtaaaaggtttacagagactaggaaatggagagaggagatcttacagcctcccaccgtgggactcagtggatttctccttccccctcgcccgttccctccaactgcccagttcagcaccgccccctccccccaggcagctgagccctggaaccccacagctggcagctcgcttggcctgacctggcttcagacagtggctggcaggatcctcatagccagagcctggggcagaactgccagcccatgacaggctgtgtggcagagcctggggctccttccccctagatgttcagggagtgggcagggcagggggcgtgggtttctgcccctccaacccctccaggctggtcctgcctgggagctctgcctcctgccacacccacggctccagtcctgtccctgcaggaggcccgcaggctcttaggaactgctgtcctgcagcaggaggcctgcaaccaggccccacgtctgggcagggggtccaggggcaacggcttccttcctgctcccaccccacaccatccagggcccagaccctctctcccctcctctgggtgttggtgcctcctgcccctgcctcggagcccccacagaccaagccagggccctgatttggggccgctgaccccacctgcatctgctctccatcctggagctgttctcagcctcacacatcctcctcagggtcttccccacctcccccagccgacccccaaagtaagatgccagagcggcatgaagccaggaaataagccagaccccacagctcctccaaagacccctgacgctcctggttgaccctctcatggggacggggcttctctcccctcagcagagccaggagctgcctcaaggcccatgcacctgccagtccagcctgtcccccgggctgccttctccctccctggcttctggatagggaccgttgcccagtgcttcctgagtccagccacctggtgggcacccccagagactcagccctgactccaggcggccagccggcagcacaggtacagccggatgcccgacacacagacatgcaggcacaaatgaacagacgcacgagcacatacatcctgaccgtttccaggggctccaggacaccccgccaagttctcccctgcaccccacacagccacccacaggtatgcacagctcacccaggtcacacacacgcaccagggtatggatgtaaccctgtgcctgcagccccactccgggacacactaagtcacccacaaggacagtcattcccacagtcacagcacatgggaaatccccggggtcccattgtggaggcctgaccggctgccgcaaagcccagccccttggcagggagcccagaagccgctgctcaaacccaggactgccaggggcacccaggcccttccagccacgctgggaacctgcacggggtgggaaggtccttcccgcctgggttacaggagggcaccgggagcccgggagagacaagggcaagggacagatggcattcggccactcagcagggccccacagcctctcgaggcctcaggaatttttcggtgacgtgcaaagtgcagaccaaagccgccaacagggcgtcttggcggactctgttttaaattattcaccaacccggccgggcgcgggggcccacgcctgtcatcccagcacctgggaggccgaggcgggcggatcccgaggtcaggagatcgagaccatcctggctaacacagtgaaacttcgtctctaccaaagatacaaaacttagccgggcgtggtggcgggcgcctgtagtcccagctactcgggaggccgaggcaggagaatggcgtgaacccgggaggcggagcttgcggtgagcggagatcgcgccaccgcactccagcctgggcgacagagcgagactcaaaaaaaaaaaaaaaaattattcaccaacccaagtagggtggagctccttccgccacccatgccctccctgacttcaggacctgctctggggcctcagcggccccaggactgaccctgagtcccagtggccgccagtcagagccactctctgggccttggcgcccccttcagccagacagcagcccaggtgtccagccagctgcaagcatccatcaacaccccgctggggccctgaggctgcacggtcccacccttgcagggctccagggcactgtctgcctgtggtcccctgccctcaccccggccaccgccctccagctgtcctcaggctccccaagccgacacccacggagcgttctgtcctgaccccaaccccagtgagctctgcccccccacccccctacccccacctgctatggggaaaaacccaccctcctctggaccccagggagcagctacagctcacacctccactgcagcccctgttcagggagctggagaggcagccgcagaggccgcgtgaggccgtggtttcctttcatcctggcccgaccctcagggcaggtgccacacaaccccctttcaccgatggagaaggggcaccgcggcgtctctggccccattgcctggcctcaggtgccagagctgggaccccacccctcgccttccccactgctccgccgcctaaagcctcggttcacaaagcacggtccaggccccccggggctcccgagaaccttcgagaaagccccaaggtcaaaatctgttttcacaataatgccaaggcttctctctcccgtcctggcttggacagtggagttctcagaggccataagaggtgtgacactcccctgctttctcgtgtcttaaatatccacacgtttagtttctagcatactaaacagtggcagatgcaacctccctgacatttaacactgtgcaagggtcctaacacgaaagctctgagcattactgtcctggaggcaacgcagagctctgcctggtgtccccccagccccccttcctgattaacgagcacagcttgcttccctgggtctctcacccgccagaagctcctcctgccctcggtgggtctctcacctgccagaagctcctctgccctcggtgtgggtggcaccagaactccccagagaccgagggctggggaccccagggcggctttggccaagcccctgccctccccagagctgacagtgggctggacacagggtatcccctgtccggcatccagcagggcaatcctggcaccctgtgggtgctgcccccacccacgatggacaccaggagcccagtcccagatcctggcctcctccagccactgccggtccccaccccacagccccccacctgagcacgaggggcgcagcaaggcccggagccctgccaggcatcagacccaaggacttgggcctgccttcattaccccagaaggggagccgaggtcagagaccctcccaggagacccaccctccaggctaccacggccaggactctcatctgctggggaccccagtgggaacagggagtgctcccatctctctgccctccctgtgctcctccccaccccagaaacacacccacctggagggggccctgtggccccagcacagaccatggcaggcaggctgggcttgccccccaccagcagtgcctggtgaccaaggctgccagagtcatccagagttagcaactgcaactgggacatgggggtgaggggacccctgagcacctcagggaccacccaagggggattcctgcaactccagctgggggctgtttttcacttttgtcccatctcaggctggcaaatttctcccatttggccccagttctagccaggtcacgtgtgaaaggacaacttccttccagacaggccctgcaggtcccactaggcccctcccatctatgtggccccacagaggcccaggatgggccagggtccatcaggaacacctgtgtccttgggtagggccaccagataaaacacaggacacccagtcagatcagaattttagataaataaggagtaccatttttgtgtaaatatgccccaaatattttacagtaaacaattatttgatatatatccaaagtcccgacgtgactgggtcctgtatcccctccttggaggcctcgtggctctgatgttcgtgggttcaaatcctccccatctggggccgtgggctgccagcaccacctgggggcccaaactccctggttgctccactcttcctcccattctacctcccttttgtgtgggtttgagggaccccactttgggaatggagggagacatgagcaggccctccaagggcgcccctagacagtgcccccatcaccactgcctgtcacctgggctgcctcgtttccgtcctcacctagcacagtgggtccaacatgccccaagggtatcaggacctcaaccctggaatctgtggctgactccatgtggcaggaaaggatcttgaagatttggttgaggatgttgagatgggggcaatcccagattatcccaggtgggccctaagtgcagtcactcgcatcctcatgagaaggagatttgacacagaggaggagagagcagtgtggcgacagaggcagagactggagtgacgcagccacaagccaaggggtgtcggcagccacggcaaggggtgaagcagggaaccgactctcctggggcctccagaggagcagagccccatcgacaccttgatttcggcagggaggctggttttggcctgaccccaggaggcctcgccatttgccgtcattggtcgcagcatccctaagagactaaggcgctatgaggccctgcggtcagcctgcctgctctgcggaaccctccgagtcaggtacccggctgcaggctgggagctgggggctgggcgacagagaggcctgcctcagtgctgtgtacagggtcagggaacctgcccaccctccaccccaccctccctgcatcctcagggaacctgcccatcctccaccctgacctcacctgcatcctcagggaacctgcccaccctccaccccaccctcctccgcatcctcagggaacctgcccaccctccaccccaccctcctccgcatcctcagggagcctgcccaccctccacccagaccctcctctgcatcctcagggaagctgcccaacctccaccccaccctcctctgcatcctcagggaacctgcccatcctccaccccaccctcctctgcatcctcagggaacctgcccatcctccacccaaccctcctctgcatcctcagggaacctgcccaccctccaccccaccctcctccgcatcctcagggaagctgcccaccctccaccctgaccctcctctgcatcctcaaggaagctgcccaccctccaccctgaccctcctctgcatcctcagggaacctgctcaccctccaccccgaccttcacctgctgcagcatgactggctgtgggccggggccgctttcccagagcagggaggggtggaaaggagctgtcctcccctctccccacccctccactcttcccagccaaggtcggggcaggttctagcccagagagactagggaagacccaaagcccccagcccactgactgaagtcaccagcctcccgggttcgggggctggagttcctacaaccacgtacagagggcctggacctgggagcaggatggataggtacaggctgcagccacaggtgaccggcttagcaggagagtgagaccaggtgtgcggggccaggggaagaatgagtgtgtgtgtgacagtcactcgcggtggaggagccctcagctctcatgcggcccccagagatcccaaaacccgcagcctggttctgtggatctgaaggcaccattctctgccctgagtagccatggagaagcccctcaaagccacccaggccacctggccttcggatggggtcttgctgctgggccacggcctgggggacaccaggccctcctcagcgagcgctcagcgctcaccctgtgcagcgcaggggaccactcttgcaggcccaccgcccaccctggggtccccgggcagggagtgaaggatgctgggccggccacttgggcagggagggggtccggggggcgcggggcccaccccccagcagcaggcgcacacggctctggggtcgctcagtttattggtaaaacgggcactgagcgtggcgagcgctgggcgcggaagcctggggcgggggcgcctttcctcttgaagaacttccactggaccttgatggcgagcatccagtcgctgaccgagggcctctggcaagcggaggtgcagacatgcgcctggcgggggtgcggggcgccggaccggcgcgcggggcgggggcggggcgggggcccgggcccggggttcggagcgcggcaccgccggggagggtcgcgccgcgggcgcccgcgcttcacttgcccgccttctgcgccttctgcgccgacttggtgaccttgccggcgccgccgctcttcttctccacgttcttgatgacgcctacggccaccgtctgcctcatgtcgcgcacggcgaagcggcctggggggcggggggcggcgtgtgggcggggccggaggacttgaccccccccaaccccagggctctggccgggcgggggcgcaaccgcgtcgggaatgtcctcggaacacgcttagcgcagagcgcgcccctgtgaagacggccggcctcgcgggagtcctgcctgggcggctgctccacggtctgcggggcggccacggggcgggggcagccctaacgctgccactgggcgaccgcgggccttcctcactcgcggggcctccctcactttcggggcctcgtctgcacacagggcccaccccagctcgtctgggcagggtcacctgcactcagtgacacggaggccgtggctctcctgccatgctctgggccaagctccgcaggaaagggggcccactgctgtccccagcgccccatccccgcagtcctctgccctcagcctggatcagccacagcctgggggctgcacctccccggaccaccccggctcaccgagaggcgggtactgggagaagctctccacacacatgggctttcccggcaccatctccacgatggccgcgtctccagacttcagggacttggggttgtcctccagcttcttgccagagcgccggtcaatcttctccttcagctccgcaaacttgcaggcgatgtgggctgtgtggcagtcgatgaccggggagtagccggcgctaatctgccccgggtggttcaggatgatgacctgcgagcggagccacaggcggccatcaggcacatcggcggtgggcaccgggagggcgccagagcggggctgggaggcccagtcaccggcgcccctgcacgggctcctgggcccggagtgctgactggagggggctcaggctctgaggacccagcccccagacctgaacctcaacatcctcattaagcaaaagataaacaactgagattcattgtttcgaaggggcaggggcagcacttacacggccaaccccagctggaactaaggcgggggggtgacaaaactggacctcaattcctgtgtttcagttgtatctcaataaagccacttttaaaaatcatatgaagaggccaggcacggtggctcacacctgtcatcccagtactttgggaggctgacgcacgtggatcacttgaggtcaggagttcgagaccggcctggccaacatggtgaaaccccgtatctactaataatacaaaaattagccaggcgtggtggcacatgcctgtaatcttacctacttgggaggctgaggcaggagaatcacttgaacccgggaggcggaggttgcagtgagccgagatcgcaccactgcactccagcctgggcaacagagcgagactccgtctcaaaaaaaaaataaataaatcatatgaagaggccagcaaagaggggcaatgaagactgtagagaataaaagtatgacagagatgtctcagacagtaagttaacaaaagcgtttttctaggacgaatgtaggacctcaaaggctgggcatcccagcagtgcagcgtggaagacagacccgcgattgcacacaggctgggagccacagggcctgcacccctcccagaactgattgatcccctcgttgagtgctcggtggccccctcggtggtatgcgggtcccttttctttttttttttttcttttgagacgaagtctcgctctgtcacgcaggctggagtgcagtggcgcaatctcggctcactgcaacctccgcctcccaggttcaagcgattctcctgcctcagcttcctgatagctgggactacaggcacgtgccaccacgcctggctaatttttgtatttttagtagagacggggtttcaccatgttgaccaggatggacttgatctcttgacctcgtgatctgcccgcctcggcctctcaaagtgctgggattacaggcgtgaaccactgcgcccagcctgagggtctggttttctccccacgccaggccacctgccgacagcagcctcacccaggacagtcctgctgctgtccagcaggcgccagccccctggacccagcgcagccccccacctgggaggtgaactgagcagcctcctgcggcgggtcagacttgctgtccccacacacgttgccccgccggatgtccttcaccgacacgttcttcacattgaagccgacgttgtcgccgggcagagcttcgctcagagcctcgtggtgcatctccactgacttcacctcagtggtgatgttcactggcgcaaaggtcaccaccatgcccggccgcaggatgccggtctccacccggcccacgggcaccgtgccaatgcctgcagaggggagggggtgtgaggggaaggtggggcccgaggggatgctggggcaggatattcggggacagagcctggaaaccaacaaagcctgggactggatccccccgacaggcctgggggttggggccacatgggcggagtgcaggggaagggaggccagggacaagggcagacacagagattccaagggaagtgggggctctcccacccagctggggaaataagaggctgagcagcagagctcccaggaacccacggaaaagccacagggacagagaagcgggaggatgggcagagaggggctgtctgaacctggggtcccatccttgcccccggagagcactttccctcaaaggaggcactatgggacccctcctttgtctgaggactcctccctgtgagtgtgggcggggcgactgactgcttctgcctggggcctggtggccctgctccctgctccctgcaggccctgctccctgctccctgcaggctctctgggccccacttggatgctgcaggtctctatcactaaaggggcctctcagccagatgcagcacaggcacagcggcacatgagcgtccctggcatttctcatggatctacttaaaccaattgtgcagctgccacatgggggtcttgtccccccccaggctactgggtctccaccctcacctcccagggctgtgagggaggcctgttgtagcctccagccaacttcactgaggccagtggctgtgctctgtgctggggtgagcatgatgcccccacagtgcacacagagatgcctgcaacatctttggctgcagcccactggctgggggtctcctatcagtgcccttctctagggtctcagatttgtttatggtttctcttcttggtgggatggatggatggatggacggatggatggggaggtgggtggatggatggatggatgtatgaatggggtggtagatggatggggaggtggatggacagaaggatgggtggggagatggatgagtagggagatggatggatggattggtggatggatggatggatggatggatgaggaggtagatgagtggatggacagaaggatggatgggtaggaaggtgggtggatgaatggatggatggggaggtggatggatagatggatggatggatggatggatggatggatggatggggggatagatggatggatggatggatggacggacggatggggaggtggatggatggatggatggatggatggatggatggatggatggatgaggagatgaacggatggatgagatggatggatggatgatggagggaaggatggctgggtggggagatggatggatagagaggtggatgggtggatggggagatggatggatggatggatggatggggaagtggatggatggggaggtggatggatggatgtatgggtgggtaggtgggtggatagatggatggatggatggatggataaatggatggatggaaggatggatggataggtaggtgggtggatggatggatggatggatgtacagaaggatggatgggtgggtaggtgggtgagtggatgaatggatggatggatagatagaaggatggatgggtgggtcaatagatggatggatagagagaaggatggatgggtgggtagatggatggatggatggatggatggatagagagaaggatggatggttgagacaatggatggatggatggatggatggagagatggatggatggatggatggacagaaggatggatgggtggggaggtggatggatggatggaaggatggatggatggatagagagaaggatggatgggtgggacaatggatggatggatgcatggatggatggatggagggatagagagaaggatggatgggtgggacaatcaatggatggatggatggatggatggatagagagaaggatggatgggtggggagatggatggatggatggagaggtggatggatggatggatggatggattgatggacagaaggatggatgggtggggaggtggatagatggagagatggagggatggttcgatagagagaaggatggatgggacaatggatggatggatggatggagtgaaggatggatgggtggggagatggatggatcgatggatggatggatggatagatagatggatggagaggtggatagatggatgggtggatggatggacagaggatggatgggtggggaggtgggtggatggatggatggatgtgggatggactgtcccacagaaagtgtgtggtaaggggagagattggagacagcccagtcttgagatgccttgtaggggcccctggtctagggcaggcagagctggccaggcaggagctccagcacagcgcccttgctcaccgccaatcttgtacacgtcctgcagcggcaggcgcaggggcttgtccgtggggcgcgtggggggcaggatggtgtccagggcctccagcagggacacgccgcttgcgttgccctccttacgctccaccttccagcccttgaaccacggcatctggaccaaagggagaaaatcaatccgttaagagacattggtggcctccccaccctcaggcctccccagggtgcttccaggagtactgctgttcaggctaaacttgcctcgtgccctttgagatgaggaatttccccaccctgctcctccccagcccatagccccagcatcacagggactctgggaaggagatccctcttaaaaggaggaggacaaagagggaaagcacccttcccagcccaggctgctcaggagttgctgacactgtgaacaaatccccagtccagccccaagtccccgaaaccccgggcccctgaccatcagctccaggcagggcagatgacttgactaggaggatgctgagtctggccaagggccaggccagggacagagctggaggagcctcgccccaccctagcttctggacaccgtgctgcctccgagcttggcccagccttgtccggagcttctcctagtgtggcccccactcccatcccatgaagcctccctctgggccacctgccacaaacagggagcaggggagggggccggcagcacagtgccccagccccccagggcctgtgtaagcacgagccacctagcagctcaggccagaggggagtgcagggtccctgatggctggaggcctccctggggaggggagagtggcgttcgccacatgataccccatgaggaaaacgccatcacaggtaaacaacaccgagcctcgtgagatggaggcggagctgggggagtccctcccagttctgtccccagacctcagctccaggctcagtgctgctggtctgtctccctgctgtctctagactccacacctgcaccctcactgtgggcagcgacagtgctggcagagcctagtggtggccattctggggtctcctctggcttggagaaccctgggaacagtctcaggttctgcaagtgtctccacgcgtcacctccagccaaggcagagtccctgggctacagactgttcgcacgttgagctcccaggtgaccggccaagagccaacccttggccatcccagcaagcccagaagcatgcacacttcccaaagcccaaccctgctccaagatcccaggggaggcagccaaggaggcccccacggcccagcccaaagcccctgcacggtgtccaggaccaggacaatggcctggcagagatgaaaccgaccgcccccatggcagggctctggagaccaagcacatgggcctggtgctggaggccgctgcccctgctgtgttgacatcgtagatgggccctggccccggccagccgcgtgggaggctgagtgtaggagcaaagcccggtgctgaggggcatggggctccccgccgggccctgagccagttagggaaacccagcaggtttcgaggggaacctgcatttcccggggacaggccctcgacctccccgtgccacctgccggtgcctcgctctgggccagggggtccagccagctcccgtggcccgccccgccctagccgccactcacgttgggggagggctccagcatgttgtcaccgtgccagccggagatgggcacaaagggcacggtggccgggttgtagccgatcttcttgatgtaggcgctgacttccttgacgatctcgtcgtagcgcttctcgctgtaggccggctctgtggagtccattttgttcacgcccacgatgagctgcttcacacccagcgtgtaggccagcagggcatgctcccgcgtctgcccattcttggagatgcccgcctcgaactcgcccacgcccgccgccacgatcagcactgcgcagtccgcctgcccggcaggggacacagtgagccctgccccgcctgcctggcaggggacagagcgagcctggccccacctcacttccaggcctctccaggcagcgggctggggcctgagcagcccactggggccttggggagggaggcatgggggtccccacttcaagggcagcatgggggctcatcgccaggccctgggtcaggggaccgaggttcagccctggctccaccaccagtgggctgtgtgtccctggacaagtcactcagcctatctgctcctgttcctcacttgaggacggatagaagtcacagttatcaaagcagtttggaggtggtggcatgtgtcctgctgtctgcagggtgctgtgtctggggtgtccgtgcgtctctgtgagtgccctgaaatgtcatacagtctacacctggcgggtggcacctctgcccactgctcactctccccatcctggcctccaacccctccatgtatgaaggtgtgtccacgtccccatctgcccccatctatctggggactctgacactggctggatgccttcacaggcactggttcagatgccagagcactggattcatccttaggggggctctgagccagactgggtgagggtggcccaggtgaggggtcccctgccctcacaggaagcacaggagaccctaccatcccagtgaccccaggggcccccagtgtcccttgaagggtgcagcggcctctcccccagccccgcctgctgtgccctgctcacctgggatgtacccgtgatcatgttcttgatgaagtcgcggtggccgggggcatcgatgatggtgatgtagtacttggtggtctcgaacttccagagggagatgtcgatggtgatgccgcgctcacgctccgccttcagcttgtccagcacccaggcatacttgaaggatcccttccccatctggagcgggtgagggtcacggctgagggcgggacccgggacccaggagtccctggtggtgcgagctgcttgttacagcagagtggccgcgagaggcgggagatgggctccagcacccccttgctctccgtcggggtcctgggacgccggccccctccgtcgggaccccacacccagaccctgccccccagggccggcctccgcacctgctccgaaatgggcgcggctacgcaggtccaccagcaggtggcgcaagggcctgggagtcgctcgctctacgagcgaagccgccagatgggataaacccctcccgggcgagggctcccctttatctgaagctgcggacgcccccagatcccttcctcaaccagaggccaataataccaccgtgtttggggctgtcagataaataaccctctgtgtgtgtgtgtttttttaaggtaaggagaaaggaaaactgaatgaggtcaggaggagggcctggccacgcagctccttcccgctgctccagcctccccatccctctgaggcttctcctccccttcctcgctctgccggacacgggaagctggggggcctcggccagtgagacccccacagaaggggacgggcttcagtcagggcagcagcggcggtcactacccagctgggcagaactcctcgccagggcctcgcacagacaggactctgccctccaggaggctgcccagtctggagcagacccagatgggacccagctggggcctgaaacagcggccctctgaaacccccgcctcctcctgacaaggccaggtaaagggtgatgcagcccaaactcaggggtgcagctcagagcacccccaaccccgccagggcagaggctcagcccaggacagcgagtgcccccaccttgggccctggcctccgccctcatcatccaggtgagagctcccacaggccctcccaggagtgggcttctccccagagtcctgggtgggggatggggatcagagagcagaccccgtctcatgaccgctccccaccaccgtctcagccaccaaagagaaatcgcttcaaaaggtcagctaggaggtcacctcatccaggacccccaccccagggctgccctggacagcagccctccacagcccagcacaagaaaatggagcagacgggccggctgcccatcaatcagctattaatagtagcgtgtgccctggcagggccctaggacaagtgagggcagtaccatctccagccccagccttggccctggggggaagggggtaaggctccagcgccctccagccccagctcaacatggcagagttccagagccttctgcagaccctcccaggtcacctccctcaccacagggcaagtccggcagctcgatggccacccctcccccaccaagctccccctaagagagaggctgccccaccagaccctctgaggcctgagtgccccacagcgggggtccctcctgccctggaggaggtcacctgagccccatgccctggggctgggagatgccaagcctggccaccacgggagttgggggttccttctcagggggccaagaccatagcctggggagctcacctcagccgcctccttctcgaacttctcaatggtccttttgtcaatacctccgcatttgtagatgaggtggcccgtggtggtggactttccggagtccacgtggccgatgaccacgatgttgatgtgggtcttctccttgcccattttgctgggagtgtgaggggctggcgggacccggggtgctctggctcagggcgaggggggctgcagtgattctgtggggccagtggtggtggggagaccggtgatggggagccccagggggagacaccagcagagactgtcctggcacaggctggacaggcatccctgcccacaaaccaagcccccatgtttggtggggagggaagggcccccacccacagctgggcctggccagggcaagcagaggctgtgcactgcccccaccccacacttgagcccaaacagccccatctgctgtaaataactgggcgttggagcccgcgggctgctccttgggaaggggttagccaccatttggagagaccacgcagcgccaggctgggtacgtccgtgaccagcagagccgggtgatgagtcacctgcccagcgctccagggccctgtcctgcacgcgcactcccctccccggcggcagggccagggacacggcgccccacccccacccgctgccaccggggagagatggccactgctccccactcccctcctcaggcagggacggcgccatcttcccctcatccctgcccggcaggctgggccagagccccgacggagatgcgctgcccagattaggaacccagaatagctctaggcacccccctcccggactctcacagggacagacagcggccgggaggtgggggtccctgttccagcctgaggaaggaggacccggccctgccgagcccagcaagtgccaggtggagatgccctcggccccgtgggggtatagggggcaccctccctccccccctccctgtgactcaggaccctgggtcacagccctgtcccatcacagaggtcagtggagaaacccacgctgctcctcgcggacaggtggctgggggagggaaagaggacagaagccaccctggggtgggaacacgggtgggggtggggaggccagggcccccagatctcaccacctccctcagcgtcctctggcccagcgccccgaagcccgacccccatcagcccccggcccgcagggtccccgcggccccaaggtcacggctacggggcgatcgccgcccaggacccggccccgccgccccgcgccgccccccaccccgggcccagcccggccgacgcggggacccccggaagccggactccgggcgcgcgcgggggcgggtgcggggcccggccaccctctgccccccaggaccggccccgggggtccctcttcggaagacgggggcgggggcggaggcccgggggccgagcgtccttacccggagccgaggtctcagccagagggactggcggcgccggcgccggcggttttatctccgggagggggtccacctattgacggtggcggcgcagtgcaccgcgccctgcagcacgccaatgcggaaccgcgcgggagggggcggggcgcggacgcgcgcgggcgggcgccacggggacgcgaggcgatgcgggaggcgcgggctgcaaagacggacgcgggaggcgggggagaaacgcgccgcgggcgggggcggggcggggggcagggcagggaggcggcgggagggagggaccgggacggagacggcgcggggagagcgcggcgggcccgggagacggggcgagagccggctcagggcaggaacacgcttgagccgcgaaaagcggtccccggggacagggcagacgccgaggaccggagccggcaggcgggggaggggagcaggtgggctgcagcctgggagacgagcctgggtctaccggcccctccccggccctgctcatgggggacgccccagaaccaacgaagcccggctctgaggggctctccctaatgaggcccgggggtgcaggcctcagggtggaaatctgctggtttccagtccctgtcctcacgtgcctgccctcctgggcgcaccatgacaggccccgaggatccagcgcagaaccaccctccccctgagaggctggtctcccacggtgcagggaacgccggaagcccgctcccagacccactgacatcttccagggaccctcccctccgggtgcgccgacctccggctgctgctgggaaacagcgccagccaagggcgagtcagatccagacagacccaggcccccccgcccagcgccccaccccgctgcacctcagcgccttgtagctgatgctcatatggggtcaggatgccaagccaaagaccgggccacgctctgtaggaagtggggagtccctgaggtcctggcacacgcgggtaatgaccaacgtgggttgtgaggaaggggatgtggcagccatgtgttgtgtgaagaccaaggttaggggctttctccagaccccaagatcctgtcgtctcacccaggtattcaggtcttccctcccacgctgcccccccacccccacgcactcggatcttcctgccagcggggtctcgggaggtgtgtgctgagtgggggcagagccctggcacctgtcctctcagccctgagttcccactgggtgttgacatggaggccccgggtcgggcccagcagctgcgactgggcaaatccatggggatccccagcgactggacccctacctggcctgctggcaggtgtgaggaggaaggaaaggtgggggcccagggtcggggccaaacagttctccccagcctgtggagagggcctctcaggaggaccctggtctgtggctgcgtctgccccataggagtccagggacttgggctcctgggccacaggcaggagaggaggcagggagggcctgctaggtgccccggcacttccgagtgctgccgatgccgtcaaacaggagccaggaataaaaataaccgcctggcaagaaagcaaggcccgccccaccccacccagctggtctctatatttaacgcctcccctgcagcctgaaggttaggcagggatttggaagtgggcttgctgcaggtgctcgagtggcccaggccggggtcccggggatgcccaccccactcccccaagggatcaccaggactctgggctaccttttccagacaccccttccccctcggctcccggctcacccatagcagtgccaggggctcacatgtgccgtggggccttgccacccacaggagtggcccctgagagtggaatgtggcaacctccccaaagcacctgtgtgctgactctgggcaagggtgtcggtggctgctccaaagggtctcccaggcgccaggacacgtttggtccacggtgtggcccctcggggtcctgggagccaccgactcagttccgcagacacttggaacacacagctaacggggctgcggtcacaaggctaaacactaacacactgatggttccgagccaccgcggagactgaacaggactgaatggctactaactacggaatgctaactgctgaataacggcagtggcctgaccacgtccccaaagtgcacgagttgtaacttaatccccaatgcaacagtgttgggggctggcgctttcgggaaggagtctgggtcataaagggtttgcccttccgaatggatttgtgccctataaacaggactcatggcagtgggttctctcttgctcttccgccttctcccatgtgaggacacagcaagaaggccctaccagatggcagcaccttgatcctggacttcctggcctccagactgagaaataaacttctgtttacttataataatttataaatttataaagcaaactttataaatgtttaaatttaagtaatgtataattacccagtctcaggtattctgtcatagcacaacaagcaggcaaaacacttgtcaatggccgggtagcaccaaatgacttcaagtaccaagcatcctaattagtcacagccaagtcgcccagctgtgtgagttcacagtgtgggggacgggggacagggggccgtgcacgtgcacagtgtgcggggatgggggctgcggggacagaggctacaaggtaggccccacaaggctggctggaggaccttgagaacctgtgaggcaactgggcacagaaaggccaagattcctgtccaaggacacgcagcaagtaagggggcctgtggcctgtgctttccctgccctcccccaggtcaggacttgggcccctcttcttgcatctgagtccctggtcacagtgccgtcctcaccaacaacctggggggggtggggggaggggaaatggcgagtcaagagggcaccagccaatcagggcttccctgggggcaggccccgcccctcctcgacccctcccagagcccccaggccccgcccctccttgccgcctcccagagcccccaggacccatccctgagctgtttggggagacacaggcaaccccttctttggctggctagggtttcacgagcctcgggaaagaagatgcagctaaaattaaccgctatcaagctgtcagccctggaaataaacctgcctcccattggctgccggtgacgtcactgctgggttaataatagccgccgagtgcctaacgaaccacctgtgcatggggcacagccaggccatcaccccggggccaccgtcgcaggcaggtggaggctggcagcccagaggcagacaggggcttggaggcagggtggggagcaaggccaaggccgctctctggcccccagtgtcacaggatgacctcagccctggcctggccccagagcaggtgtggattcattttccggtcacggagcatctcgtctgctggcccacctgggccccctggacggccaccaggacaaggcccacccccgcggccatgccttggggctggctcccaggggactgagcatgcccttgaggcagcgaattaaacagtctccatggcagcagaggagctcctgcctctggagcctcccttagaggagcagctcatgtccccccagatcagagaagctggggctgggctggcagcgggcaaacatgcctgcaggtcaggccacagaccagggccagccacggccccgacagcccaccctccaacccggtatctgggtgtgcctgaggcagacctgagtctaccagggaggcccaggagggatgcagcccctccgccagggggaagggcggcctggcctgccaccccgacctgcaggccccagcagggagcgttgccatggtgagaggcagcagcagcaggatgccctccctccaggccctgctgcccgggagcccagcacccaccctggtggggagcagacagcacgtgctcctgccgcaagcagcactttctgggcttctgggcttccagctgcagtccccgctagcccctcccggcccctggccattacagcccattgcaggctgggaggctaaacaggaggccggggtcaccgaccagggtggggtcacctcttggacccaagaagggcagcccctggtgccagcacaggggcgctgtgccctccagtgcccagaggcagaggggagagcctgggtagggtctgcagaccattgaccctacagctgcctcctctgggccctggaggaagagggggccatcaattgtgtctcattctgcagctggtccagagagaatggggggtccaacgtctgtggtcaggtctggagagaatggggggtccagtgtctgtggtcaggtctggagagaatggggggtccagtgtctgtggtcaggtctggagagaatggggggtccagtgtctgtggtcagggccccctcaagggcccactaaagcagagctcccttcctgggccccacccaaggtcccatctcctctcctatgtagccggcaccaggttcaagggggatctctcaaggtgggaaattgccctggggaacctgaagttcattagcagctctggaggccctgttttcacctctttgaatagcccttccctcaattaggcagctgggaatcttatgaagggaataacaggaccctgcctgcaccctggggatgagcctcccaggggctgccgcccaccatcgcctcccacagagattcagagcctccccacccctggagggacctccccacacggccaggaaccgagcagctgggccagggcaggaggaagggcagggagaacacagaggggacgtctgcctttttaaagacgtgactttgagcatacatagagaaaagtgacacactgcaaatgtgcctgatgagttatcaccaggaaaacacacccagaccaagaaacaacattccctcctgcccctcggtaaaggtgacttctgacagcacagatcacgtttgcctgtttttaaactttatataaagggaacacaatgcacagtgtgtatccttttgtgtggcttctttcacacacgaccgtgtctgtgagatgcctccatgccgtcccgtgcagcaggcatttgttcattttcatcactgtactgcattccacttccagttctgaacgactacaaataaagctgctacgaacacttgtgtgcgtctctcttgtgcgggtgtacctgctcagtacacaccccaggatgtttcagccacatgataggtgcattatgccaaccactagtttattgtcttttggctcgaaatttaaccttcaatacctgctccacagcagtggacagaattactttaagcatttctcctttacactgggcagattcattttttttcttttctttttttctgagacagggtctcactctgtcccccaggctgtagagtagtggcacaatcatggttcaccacagcttcggcctcccaggctcaagcgatcctcccacctcagcctcccaagtatttgggactacaggtacacaccaccacgcccagctaatttttgtattttttatagagatagggtcttgccatgttgcctaggctggtctccaactcatgggctcaagtgatccacccgccttcgtctcccaaagccctgggattacagacgcgaaccactgcacccagctgagattcacttttttgaggaaggcaataaagggtgaatttgcagctggaaataaatcaattgataattggcttttaccccttgagcgtgggttgcattgtcctgtttcttcgtgtgtctagtgatttttgactgaatactgaacatcatgtggagagtctactctgcttcctcctctgaagctgtcggtgtttgctttgcaggttggttcactgctgggccctgtggacttgttctcatgctttgtcagtgtcgatgtcgaaagcccaaagtgtttcccaagtcctgctaccttggtaagactcaaccctcaatctcagtctcccctgcagatctctgtggggcttggtctgaactttcgttaggtgagtgtggagtaggcattattgtacattgtagtcctttctcctcaaaaaaaaaaaaaaaaagtaaggtctctccactctagccaggtccaaatgccaaatgccaatgccgcccaagtctctccactctggccaggtccaaatgccaaatgccaaaatactgcccgacacagcttgtcctctactatctttgttctgctctaacctgggtggatacaacctcaggtaatccctggtgagtcgcagccttgagtactttcctccgagaaacactacggtttgtgtccagcccatagaacacagaaaggtgataagtcactctgtgattggctgcatcattccaggctctgtcctgggggacggagcagcaagacacccctgctgtctgtgaagatatggctgttggaaggcatgggaggggcctcgtatcagggaaccagtgagtggccccaggctgccagccaacaagaaagcagggacctcagtcctacagccacaaggaactgaattctgccaacaaccacgtggccttcaaagaggacctcaagcttcagaaagaaataccaacaccttggtggcactcttgaaaccccgagccacccagcggaattgtgtgtgggctcctgaccccccaaaactgagaataaatgcatgttttttaaagctactaaatcggtgttgattggttatgcagtgacggataacagcacagggcctatagtcactgctctctggtgagcctccggcacctcctcaccctcagccacaggcttgcagaggtcccaagcactccccaccagcaacatgcacacctaagcccctcactccagtctctgcctctcatcccagggggactgccgtgctctgcctggagccctgcttgtggggttatggccaaggagagccgggagtgtgggcgcctccaagcaccctctcggtcttgtgctgtcctcaccccactgcctgaagagagcagcgcacgaattttgtctggtctcagagtcgtttctggagggagacgtacctggcagcagctactcccccgcaactggaagcagcggttgactccacatcaatacaaagacaaggttacttcagtctttttacttttatattttattgttttactattttcacggtatatacattgggcctgtctttttaaaaatcttttatgacactgaaacttttgaagaatgcaaaccggttgttttgtagattgtccccgcattgagcgttcctgacatttctgcatgaacagattggcaccaagagccaggcatccttcccagcactcgggacgctggctgcccaccagcggcaacggtacctttgatcctctggttaaactggcatccacaagcttctcacagtaaagttaccactttgccctttgtaactgataagtaagccgggcacggtggctgacacctgtaatcccagcactttgggaggccaaggcgggtggatcacttgagcccaggagttcaagaccagcccggccaaaatggtgaaaccccatccctactaaaaattcaaaaattagccaggtatggtggcacatgccggtattcccagctactcaggaggctgagtcacgagaatcgctggatcccgggaggcagaggttgcagtagccaagatcatgccactgcactccagcctgggtgacagagtgagtgagaatctgtctcaaaaaaaaccctgaaaattaacaaggaagtacttttgatactggtggccaggggaggtccccaaatgcgaatgggaccttgacccaggccagtgtcctgcctcttaacaccatcacaaaacgaattcaaggatgagttaaaaaataatgaaagtagagatttattgcaaagcaaaaagtacaccctccagaaagcagagtgtggctgggtgtgaaggctcacgcctgtaatcctaacacattgggaggctgaggcaggagttcgagatcagcctgggcaacatagtgagaccctgcctcataaaaataaacaagcaaatagaaaaaaaagtcaaagaagaaaggggagtatgggtgttctcaagaaagtgagtcgtgaggcagggtttggggcccctacctttaatgggtttctttaaccaaggagtggaatattcataaagatttctggaaaaaggtgaagatttctaggaactgtggtgccacccttttttacaccaaatatgtgtgttcctggaactgtcatggcactgccgagtgtgatttgtgtgttgatgagcatataattaggtcaccggtgaaacccaggtcaagtccgctgccatgtgggtccagtcgtctcggccagcgtggcccagtgggtccagtcatcttgtccagctcggcccagtgggtccagtagtctcggcccagctcggcccagtgggtccagtcgtctcggccagcgtggcccagtgggtccagtcatcttgtccagctcggcccagtgggtccagtcgtctcggctcagctcggcccagtgggtccagtcgtctcggccagcgtggcccagtgggtccagttgtctcggctcagcgtggcccagtgggtccagtcctcttggcccagctcggcccagtgggtccagtcgtctcggcccagctcagcccagtgggtccagtcgtctcggcccaggtcggcccagtgggtccagtcgtctcggccagcttggcccatgtcctggtcttcagtgtctggtcaccccctggcctctgcagctttttcaacagctctcttttgatagccatgaaactgctacctggaatcatctgttctcctgcggccaccctgtcgtagtcctgtctcactttgggttaggtaaatgtcctgtccctcatcagaatccatctctggacttagcattcgtggatgattcatggatcagtgtttactatgatggctgtgcgtcttaaatcattgttttatctgtcattatttttttgaattgtcacacagtaagttgacttttttggaagatgtacgactctgtgaatattcacacacacgtattgccaccgccgcactcaggaagcaggacatcccacgactcggaaatctccccagacataccgtttgcggtcacccatcctcttccccctggaaaccccatttgttctaagaatgtcagatgaggcccaggacgtagacgcaccgggttgcgttgaggtctggcttttctgacttggcacatcgctgtggacacccacccagggggtttcacggatcgacggctcgttccttctatcactcagcagtatctcgtacacgacacaccacagtctctgttcacccgcagaagaacacctgcaatgtttccaggttgggcagctatgaatagagctcccataaacatctgtgtaccgtcctttaacgtaaacctgtttgaatttgtcttggataaatgctcagaagcggaattgctgggtcatacgtcaggcgcaggtttcccttcaccagaagctgccgacctggcttcgggagggaaacccgcgccgtctgcacccccaggggagttcccggagcctcacggccgctgcagcacttggtgtccttggtgtttggaaatttttttttttttttcagctgctctcataggtggcctctcatggtgcttttaatttgcatttccctaatgttgctgaagaacatttcatgggctagttagtacacggtctttggtgaagctcccattaagtcttttatcctttttttttttttttttttttttttgagatggagttttgctctcgtcgcccaggctggagtgcagtggtgcgatctcggctcactgtaacctctgcctcccaggttgaagcgattctcctgcctcagcctcctgagtagctgggattacaggcatgcaccaccaccctggctaatttttttttttttttttttaatagagacagggtttctccatgttgcccaggctggtctcgaactcctgacctcaggtgatccgcctgcctcggcctcccaaagtgctgggattataggcgtgaaccactgcacccatccttttatcctttttttaaaacagctttattgagatatcatttacatgccataatattcgcccatttaaagtgcatgatgcaatggctcttagcatatttacaaagccgagcaaccatcaccataatctaattttagaacatttcatcaccccgaaaagaaaccttgtaccatttagtaatcagtccccattcctcctccacctctaaccaagccctgggcaaccactcatctgccttctggctccatgcatttgcctgttctgggcattttgtatgaatggaaccgtgcgcagtgtgtggtctttgctgactggctgcttctgggtttggtttctctgcgtcgcagcctgcgtcagtgctttcttctttcttattgccaaacaatcctctgctgtagggacgggccacattttgttcatcattcatcagttgatggacatttgggttgtttccacttttttttgagacagagtcttgctctgtggtccaggctagagtgcagtggtgcaatctcggctcactgcaacctctgcctcccgggttcaagtgattctcctgcctcagcctcccaagtagctgggattacaggcacctgctaccacactcgactaatttttgtatttttagtagagacagggtttcgccatgttagccaggctggtctcgaactcctgacctcaggtgatccgcccacctcggcctcccaaagtgctgggattacaggcatgagccaccgcgcccagcctgtttccactttttagctaacatgaataatgctctatggtggtacaagttttttgtgtgtggacacgttttcatttatcccgggtagatattgaagagcaaaatcctgtgactatatttaaccttttgaggaaatgccaaaatgttttccaaagtggttacactatttcacattcccagcagctgtgtagcagggtttccattcctctgcttttattattgtgtgtctttttatcagagctctgctgggtgtgaagtgttgtctcattggggtttggatttgcatttccctaatgactaaccctatggatcttttcatgtaccttttagccatttgcatgtcttttttgcagaaatgtctattcaaatccttgacttttttttttttttttttgagatggagtctcactctgttgtccaggctggagtgcagtggtgcaatctcggctcactgcaacctctgcctcccaggttcaagtgattctcctgcctcagccccccgagtagatgggactacaggcacgcaccatcatgcccagctaaattttgtatttttttgtagagacagggtttcgccatgttggtcaggctggtttcgaattcctgacctcctgatccgcccgcctaggcctcccaaagtgctgggattacaggcgtgagccacggcgcccagccccttggccaagttttcaattgaattgtttatttttattttttggtgttgagtcttgagagttttctatgtattgtggatacaagtcctttgtcagttctgtgacttgcacatattttctccaagtctgtggcttgtctttctaatctcttaacaggatcattcacaatacaagttttttatttcagtgaagcccagtttatccatatttttcttaagtggatcatgcttttaatattggctgctcaggtcacaaagattatctcttgtactttcttctagatgttttatagtttacattttatatttagatacattatccatttgtatagttaatctttgtataatatgtgagatttaggtcaaggtttttgtttggttggttgttttttgttgttgttgttttgttttttttttttttttgcatgtgaatgtcaaattcttccagcaccatttgttgaaaagattatactctttttttttgaaacaaggactcactctgttgcccagggtggagtgcagtggcatgatctcagctcactgcaacctctgcctctcgggctcaagcgatcctcccaccacagcttcctgagtagccgggactgtaggcacgtgccacgaagcccagctattttttgtagagacaagttctcaccatgttgcccctgctggtctctaacccctgggctcaagtgatccgcccgcctcagtctcccaaagcgctgggattgcatgcgtgagccactgtgcccggcagaaaagatgatacttgctctgtcaaatcactgtagtgcctttctccgagaacatttggtcacatttgtgtgaggctgtctctggactccatcctgttacactgatgtctgtatctgtctcctcaccaagacctcactgtcttgttttttttttttttttttttttttgagacagagtctcactatgtcgccaggctggagtgcagtggcacgatctcagctcactgcaacctccgcctcctgggttcaagcgattctcccgcctcagcctcccaagtagctgggattacaggcacacgccaccatgcccagctaatttttgtatttttagtagagacggggtttcaccatgttgggcaggatggtctcaatctcctgacctcgtgatccacccgccttggcctcccaaagtgctgggattacaggtgtgagccaccactcccggccctcactgtcttgttttgttttattctgttatttttgtttttctaagacatcttgttatcgcacactgtgttcaatattgcgattttgtagcaatttctaaaataagatcatggccgggtgcagtggctcacgccattaatcccagcacttcgggagcctgaggcgggcagatccctgagcccaggagttcgagaccaggctggccaacatggtgaaaccccgtctctactaaaactacaaaaattagcggggcgtggtggtacatccctgtaatcccaactactcgggaggctgaggcacgagaatcgcttgaacccaggaggatgcagtgagccaagattgcaccaccgcactccagcctgggcaacagagtgagactccatctcaaaaatataaaataaaataaaaagtaaaataaaataaaatgaggtcgtatatggaaagaatagtcttttcaacaaatgacgttagaaaatctgcatatccacctgcaatataatgaaacccgctcttccctcacctgtcaatcaatatcatgaagccggctcttccctcatctgtctatcaatatcatgaaaccacctcttccctcacccgtctatcaatacaatgaaaccacctcttccctcacccgtctatcaatatgatgaagccggctcttccctcacctgtctatcaatatcatgaagccggctcttccctcacctgtctatcaatatcatgaagccggctcttccctcacctgtctatcaatatcatgaagccggctcttccctcacctgtctatcaatatcatgaagccggctcctccctcacctgtcaatcaatataatgaagccgggctcttccctcacctatatatcaatatgtgatctaataaaaatatactactatttgaagaaaccataggtgtaggctggacacagtggctcatgcctataatcccccagctgtttgggaggctaagatgggaggatcacttgagcccaggagttcaagaccagcttgggcaacacagaaagaccacatctctacaaaaaagtaagaaattagctgagagtggttgtgtgcccctgtagtcccagctaccagggaggctgagatggaaggatcccttgagcgttggaggtcaaggctgcagtgagccgagaatgtgccattgctctccagcctgggcaacagaggaagactgtgtctcgaaaaaaaaaaagaaaaataggtaaattgttcatgaccttcttagataagacactaaaaccacaagcaaagtaagaaaaggtaggtaactggactttgccaaaattaaaaacttttgagcatcaaaggacactgtcaagagaatgaaaagagaatctatagaatgggggaaaatatttgtgaatcacagcagataagggtccagcattccgaatatacaaaggactcttacaactcaacaatacaaagacactcaatatcattagtcattaggaaaatgcaaatcaaaaccacagtaagacaccacttcacactctctgaggtggctataatcagaaatatgaaaaatatcaaggttggcaaaaatgtggaaaaatgggaagcctcttccattgttggtagcaacataaaatgttccagccactgcggaaaacagtctggcagttcctcagtaagttaaacatagacagcgatgtgtgagccagcaattccactcctaagtacagacccaaaagagttgaaaacaggtattcaaacaaaaacttgtacatggaatgtttgcaacagcactatttataatatccaaaaggtggaaacaactgacgtccataaatggatggagagagaaatgtggtctatccatacaaaggaatgctattcagccacaaaaaatgaatctagaaaagtgggtgaagaaaccagaaacaaaaggcacaactcgtatgattccatttgtatgatgtgttcagaataggtaaattcagagacacagaaagcatattagtggttgccaggggctggggacggggacaggggaagagactgtttaatgggtgtagtttccttttggggagatgaaatgttttggaactagtcagaggtgatgggtgcactgcattgcgagtgttccatgatgctactgaattgcatattttaaaatgcttaattttatgatatgggaattttacctcaacaaaaattattgaggtagcataatttctctatatcattatctttgagatagagtctcgctctgtcacccaggctggagtgcagtggtgtgatcttggctcaccgcaacctccaccttccaggttcaagcaattcttctgcctcagcctcctgagtagctgggattacaggtgtgcaccaccaggcctggctaatttttgtattttttgtagagacggggtttcaccatgttggccaggctggtcttgaactcctgacctcaagtgatccgcctgcctcggcctcccaaagtgctgggattataggcgtgagcctccgcacccggcctctgtatcattattttccaaaattgttgtagttgttctagttcatctttccattttaattgtgggaactgcttgtctatatcttcagaaaatgtggctgagatttgtactggaattgcatttaatgtataaatcaacatggcaaaaatcagtatctctactgttgagtccaaaacccaggaacacagcatgtctctccgtttgcctgggtcttgatactttcattaacatttcatttttttaaatttctgattctaactgtacattgcaggtagaaatactgtattagtttgtccttgcactgctataaagaactacctaagactgggtaatttataaagaaaagaggtttaattgactcacagttctgcaggctgtacaggaggcctcagggaacttacaatcatggtgaaaggcaaaggggaagcaagcacatcttcacgtggcagcaggaagagagtgaagggggagttgctacacactttcaaaccaccaggtctcgtgagaactctataaccagacagcactcgggaatggtgccaaaccattagaaaccaccaacatgaggccgggcgcagtggctcacgcctgacaccccagcactttgggaggccgaggcgggcggatcacaaggtcaggagtttgagaccagcctggccaatatggtgaaaccccgtctccactaaaaatacaaaaaaaaaaaaaaattagccaggcatggtggcgggcgcctatagtcccagctactcgggaggctgaggcaggagaattgcttgaacccaggacgcggaggttgcagtgagctgaaatcgggccactgcactccagcctgggggacaaagcgagactctgtctcaaaaaaaaaaaaaaaaaagaaagaaagaaaatagaaaccaccctcatgacccaatcacctcccaccaggctccacctccaacactggggatcacaattcaacatgcagttggggactcacagccaaatcatgtcaaatacaatggatttttgcatgttgactttgtatattgccatcttgctaaccccacttattcactgagtttgcttttttgtagattccttgggattttctacatagacaatcatgttgtctgggaatcgggagaggtttatttcttcattttcaatctgtatgcctgtactttgcttctcttgtattttactgactaagacttccaatagatggcttttttgttgttgttattgtttttgttttttgagacagggtctcactgtgtcacccaggctggagtgcagtggcatgatctcggctcactgcaacctccacctcctgggttcaagcaatcctgcctaagtctcctgagtagctgggactactggcacgcaccaccacacctagcatgttttttgtttgtttgtttgttttttagtacagatggggtttcaccaccttggccaggcgggtcttgaactcatgacttccagtgatccacccgccttggcctcccaaagtgctgggattacagttgtgagccaccgcgcccggccggtaaatgttgataataggagtaggagtggatgcgctcgtcctgctctcagtcctgggaaaaggattctctcacctcagtacagcactggctgtaaatacttcatcagagctctttcttagattgaagttgttttctgttcctgctttgccgagatgttcaccgtgaacgcacactaaatgttgtccaatgctcgctcactgtccatcgcttgatgtaaggggcttacaactgcaggttggtgcatttttacaaatcccagcacctgtgccatctcagtgttagcatttgctgactgtttttttccatttatttgttttttcggggtttttttgagatggagttcactcttgttgcccaggctggagtgcaatggcgcaatctcagctcactgcaacctccacctccaggtttcaagcaattctcccgcctcagcctcctgagtagttgggattacaggcatgcaccaccacgcctggctaattttgtattattattattattttttttggagatggagtcttgctctgtcgcccaggctggaatggtgtgatctcagctcactgcaacctccacctcccaggttcaagagattctcctgcctcagcctcccaagtagctgggattacaggtgcccgacaccatgcccggctaatttttgtatttttagtagagatgggattttgccatattggtcaggctggtctcaaactcctgacttcaggtgatctgcctgcctcagcctcccaaagtgctgggattacaggcatgagccaccatgcccagcaactgagattttcctggttcacttatgccaagtaattttggattttatcctaaagtgtagggttttattcttttttttttttttttttttgaggcggagtctcgctctgtcacccaggctggagtgcagtggcgcgatcttggctcaccgcaagctccacctcctgggttcacaccattctcctgcctcagcctcccaggtagctgggactacaggcgcccgccaccacgcccggctaatttttttgtaattttttagtggagatgggttttcaccatgttagccaggatggtctcgatctcctgacctcgtgatccgcccacctcggcctctcaaagtgctgggattacaggcgtgagccaccgtgcccggcctcgttttccatttaagttgagattttcctggttcagttatgccaagtaattttggattttatcctaagtccagggttttattctttttagagatggggtctctctctgtcacccaggctggagagcaggtgccatcgtaattcactgcagcttccagctcctgggctccagtgaccctcctgcctcagcttcctgagtggctgggaccacagcgcgtggctctttgatgaataaacactccttggtttgctgtttgcctttggttaaattccaaagcactgacatggttgtttctgacttttgtttagatttacaggtacattttggagagagggtttgttgacctcctcacccctccactctggaaatctttaatatattttattatgcaattcaaccttccatccaatatacatactggacgcctgcctcctgcatggctggctctgcctcagccactgggacccagggtgaacagatacaccaccttctcccacagtgcttgtgtaaccaccaagccaatgtcctgagttacttccaacagtgaaaggtacagggattaataaggaactttcgctgagcacctgccccgtgccagatactggtccaagcacctgcaggaagcatcttaccctcaaggtggccacaggagttagctatgcccgtctcacgcgcagggacactgaggaacaggcagccttggctgctgccccccggacttcacctgccacatcaggtgccgccggcatagcaggccttcatcaaatattagtcagcacttctgttttcttctgcaggtggtgacaccatctaagaggcactggccagagagctgggcagcagctgccacctgggatgaagatgggcagagctgggccaccagggccgtggtgtgaacacaccactctccctccaggggccgaccaacgagctccgggggtccaaccctggctccggctttggcagaactctcacctcgcccccagacacctgtgggaggagcacagtgcaggtggcgacagctcccaggggccgagcaaggctgtgagcctccgcactaggggcctctcccatctagtcctccccacacgctggggttaacgcattcttaacatatgtatgttaacccaaccataacaaggtgccaccatcgtcccgtccacaagggaggagacagtggctacagggtggcaggcagcccttacaagtgggactggaagcctttccctcccgccctgtgggaagcctgtggccgtccccgccctcgtccagctgtgccctgtcctctccagctgaccgtccccgtcaatctcatccctgccaatgatcacatcctagcagcaaccgggcctgaaccggcctgctatagcttgcgcacaatgcatcttccgtccgcttagcttttctgcccccatttcctacagccggggaggctcgggtgcagtgtctctcctcgctcctgcttcctgacccagagcccagacctgggacttcccaaaagcccccagacacaccaagggcaccgccgaacccctcagagccaagggagaggagagctagcgttccctgagctcaccttgcctggtggcacgggtcccctctgtctgcggccactgtcatgggagaagccaggctcagccactggcaagagcaggcagccagcaagaggtggatgtgggtccaagcccaggccacacggctcccagcaagagccatggccaggggccagtcggcagcccctctgcccgacaaggatgtgggccagcgtcgtctgcacttcagaggagacgagaaccaggaggcggcccccgagggcatcccgcgggtcctcacggaggctgcgttctcccaccttggccaggatgccccgggaacaccatgcagcgtctctgaggcttcctgtgcagaggggctcacagagcccccaccggcctggtttagtaaatgcagtttttaccttttcactttaaaggaaaatgaaaattcctcctttcagacgctctgtgactgatgttgaccggtgttgactggtgaggttgagaatgaggtgagctgggtcaggccagcctagagggaagcgggtgacctggaaggccgtgctgtcaggcgtggtcggcagtcggccccacggctccttcagggtgggcctggaccacagacacctcaccagggtctcccgtccctgggcggctgcatatgggtccaagcaagccacaaaggctgtgccagccaagcccaacgcaggccgcccctacagtccctgcccggccctgcaccctccccaccccttcccaggtgctgatcaccagtactcactctgcaccccaaaccccaaaccccgtctcagcgtctgcccctgaggaccctctgagtgtcaacccaactgacccgtctgcctcatcagtgacccctcggggctgcacacctctcccatcgcaggtcctggcactgctctccggcaccgagctccccctcccaggtggggctcaggcggttccctgccctccgtccttagacctcagctgaaacctgagctctccccaccacccgcccccgccagcctctgcactgctccccacgggaaggccgttctcccttggtttaccgttccctgcgcttggctcggccatgtgcacatagtaggtgcttaccacactcgtgcaatgaacacacagagcggtgcagggcccaggacagcgccttccccacgtgctcagggggcacaagggcgtccctccaagtcttgctcaggggcctcccagggtccctgcccagctgtgggtcctcactgagcacccggcgaggacagagtacggcatccgttggcctcgatctccggaacaacacgggcacacggccgtcccagccagcaacgagagccacgaaacaaatccacccgggctgactcccgaagccctcggactgttccgccccacggacctcccggaccctctcttccacggggaagacaccgcccagccaggaccgggtgtataaagaaacgggatttccgtaggggcaggccgatttcccctgcggggccgagggaggtgtggggaggattctgcgctggggggaggaggagagggaggacgcctttctgcctgggaagggaaaacgcgccccctcctgattggcatggcgggccgtcccccgggccccagggccctgccgggaacgctctgggctccccaaacatggggtctccgagcagtggggcccagcctctgcctccggcgactggagactcacctcacccgcccaaatccgccccgctctccgactgggccccgcctcccactgccccgccatccgcccaccctttcaccgccccctgcgggcagcaggcgcgtcctggggctgggcaaccggggtgcaggttccggagctgccagagctgtgagggggactcgggagagatccaggttcctctggctgcgaagtccctggaggccgggccggagggctccgcgcacgtagcactttttggcccgcccggcgcccccgtcgcctccacaagggctgaagaggacgggcgggctggaccaggcggggctccgagacgcgtccgagacgggggcctgggcccgggagaggggcgggggctgggctcccggacccgggcgcggggccttttaacccctgcagacccaggaccggccgggccgccccaagacgaacgccgcagggctgggctcagcccaagccagacggcgagagtcgcaccgaggtggaagctgggggcgcggcctcgccggggccaggaaaggggcggggccgggtggggcccggggaggagcctgtgcgccccgccctccgtgacgcgccgcggcccccgcgcatataagtgggcgcgtccgcgcgtgcgcaccccgcgcgcgcctctctgtcgtggcgcggcttcccgcggtcttctctgcaaatgggctccgtggcctagcgcccccgtccccgccacccgtgatcgtgcgccgaggcccgcgaggggtcgccgcccaggtgaggggcgccgcgcgcgggtgggacgagcaggcccgaggggcggggggcgaggggcggggctgggccgggggctcctctcctctccgcctggcgagcgctgggctcggggtccccggcgggctcctctcgggtcgggcgggttgggacggcgcccaccaggttcccgacgtctgggccggggccccgcgcacaaagcgcctttgttccacccgctcggccggtttgggctggttggagccgcccgcgccccgcgcggcgaaggcggtgccgggagctggggagccccgcctcggtaaataacccagcgcggcggctccacccgctggggagcgcccttcatgacggaaggccgctgacccgaggggctcctccacccccatgcgcagatcccaccagccagcaagctaaagcatggcggccatcccctccagcggctcgctcgtggccacccacgactactaccggcgtgagtagcccctgccccccatccacgcggatgctctgctggcgccagtgccggccccgtgcaggctgcggaaccagcgctcggcctgaaggccggtgggctggggggctccgcgccccgcgttgctgacgggacctctcctctccaggccgcctgggttccacttccagcaacagctcctgcagcagtaccgagtgccccggggaagccattccccaccccccaggtgagtgcaggatcgcccctttctccccccgctcctccaggagctggcagcatcaagaccccacttcgcttctctcaggtctccccaaggctgacccgggtcattggtgggccagcttctttttcgggaagtccaccctcccgttcatggccacggtgttggagtccgcagagcactcggaacctccccaggcctccagcagcatgaccgcctgtggcctggctcgggacgccccgaggaagcagcccggcggtcagtccagcacagccagcgctgggcccccgtcctgacctgagcggttaccaccagccccaggcctgcggaggcgctagtccaccagagcccctccccgcccctctccccactccgcatccctcgcccccctccccacctcccaccccccaccctgtaaactaggcggctgcagcaagcagaccttcgcatcaacacagcagacaccaaaaaccagtgagagccccgctctctaccgcccggccccagcactcgctagctttcctgacacctggaactgtgcacctggcaccaagcggaaaataaactccaagcagccagtagccccgatggtgtgtgcctgagctgtgtggcccgaggttccatttgagtgtgagaaatggctgaatccctcccgacctcactgccttgtgggggctggccctgctcccaggcctttctgggcctcctcacgctgtgaggctgttgctggggctgataagggtggggttcactgctgcttctggagagccttggacagcaggcagtcctggagctggacaagcaggacccagggcagccactgaggtgggcccccgtgccacctttagcggggggaaagggagcagggagggctggtcctctgagggattcaggccccttacccgagggcctgcggggcggggagtagcctctggctgtgagctgggaagccctcactctggagggacctggttcctgctggtaggtgtctcccaagggcctcccataggggtgttgccccaagacaggctgaggggtaggggctgcaggcaccgtggaggggtcttcctgccacaggcagcccagcttaaagtgagggtggctgcatcattctggcctggtataggcatggagtgttggagtccgggagtgctgcaggctggcagggatgggggtccacacacaggagtgcatgggctgtgagcttagtagactccttcataaccaaggtgggtggtgtccccacacctctgccaggagcctacagggattgactcagttctgttgagaggcagcttagtgagcaggtgggagtcagtgagatagctggagacttgatgtgtggccagggacatggtgagaggaggggcctccgtggggtgggaaagggtggggttcagtggtgggggagggactctggggaggggtggggatcagtgggtgctccctgcctggtaccctgttccactgcactataaatagctgtactagttggtgggaagctggtgggaaggcatctggcttgtggcctctgatggctgagcctttgtcctgtccacagggtggaggcagcctcacccagccatccaagccggtggtcagtgctgaggctgggtgggggagcctccgatggacccaggagtgggaggctgctcctaatggcagttgagccccctgcagccttttgcagtgtccagatgaagcccacagagaccctcctccatgtacacacagctgtgagggtagcaggagttggtgttgaagggagagcccagccacgctcaggtccccaccacacatggcctgggggggctccgcccttggctgagctggagggcttggggtcaggaccaagggtgggtccaccctgcttggaaagaagctgtcctggcttttggagtcagcgggggaggggcactgcccgggagctggtgtcttgttggaaggggcagctgggagtagggagcagccgagccacaggctgcccgcggcatcgtcccctgcctcgggtcagggggccccttgactggaggacctcacaaccctgggggtgtccatggcctgttcctgggagctgcaccctcatcagattctctgtagggggagaagtcatatcttttcctcacccatcacaagcttcatggctgagacctgttagaaacaaaatgcttcctcggtgccacaaagaaatagcactcaaacattaattttctcagcaaggcaatttttacttctatagaagggtgcgactcgcggatggagcaatggtgagagcgcacctggacaagggaggggaaggggttcttattcctgacacaggtagcctctacggctgtgtcattcccctgttgggtggggttggactgcacactctaaggtaattctgattgactattttaaagagagcaggggtgtgacccagagtggtggggtgagtagtttggcaggaaggacaggaacaggtagctaaagatgacttaggtcagagcaggtgaccaggggccgggtgcgatggctcacgcctgtaatcccagcactttgggaggccgaggcgggtggatcatgaggtcaggagatcgagaccatcttggcaaacgtggtgaaaccccgtctctactaaaaatacaaaaaaaattagccaggcgtggtggcgggcacctgtagtcccagctactcgggaggctgaggcaggagaatggcaggaacccggggggcggagcttgcagtgagcggacatcgcaccactgcactccagcctgggcaacagagcgagactccatctcaaaaaaaaaaaaaaaaaaaaacaggtaccaggatgagtcaggacggagcaggtgaccaggggaacagatgtgaactattgattaaaactggtggaaaaggttgtttactgaaactatgcacgagttaaatggagaacaaagaactgaacatacatgctgagtcctctaagagaaatctagaactcactgtatccaacagacccttgaacaaaagacagattaaactgggcgcagtggctcacgcctatattcccaacactttgggaggctgaggcaggtggatcactagaagccgggacttcaagtccagcttggtcaacatggcaaccaacacggcaaaaccctgtttctatcaaaaacaaaaaaattagccagacgtggcggtgcatgcctggagtcccagctactggggaggctgagatgggaggatcccctgagcccgggaggcggaggctgcggtgagccaagattgcgctactgcactccagcctgggcgtcagagagcaagactctgtcttaaaaaaaaaaaagaaaaagcatacaaacatttaatgcgagttccatgtgatgtgggccccttcaaaacaaagaccaaagaaatggtctatttcacagcggagcaggagtgagcggaggatggaagggtgtgatcaaggcccgacttgactctgacatccctttcctctggttagggggcgggacaccacgtgagggtctgcagggagagggtctgggagtggccttcctgggttttatggcctgcttcagggaagaaaggcagggaggttagaatggcctcaacggtgaaatatttatctttttcttcctccctaatcccagaattcagaaactgttagtgggtttgcataagttcaatgagaatctgttcttgtaatagggcacaattgaaaacattggttatattaccaaggctttgactggaatgtcctattttcagatacgactaaaggagttagggttgactgcatggtccaataaagccccttggaaaaaagctggcctggtacctcacatacgtggttcccttacagatgagtaaagaatgtcaattcctggcaggtcccagaatcttaagataccttagggacctcaagaagagaggaattcccctaaatctgtacttattgcaggcaaagtctgatggcaagtctttgcgatggcttcctagcctcaagaggcttttaaaagcccaatctcagattccttataaaaagttccagtaggccaggcacagtggctcacacctgtaatcccagcactttgggaggccacggtgggcagatcacgaggtcaggggatcgagaccatcctggctaacacggtgaaaccccgtctctactaaaaataaaaaaattagccgggcatggtggcgggtgcctgtagtcccagctatgcgggaggctgaggcagaagaatggcatgaacccgggagacggagcttgcagtgagccgagatcgcgccactgcactccagcctgggcgacagagcaagactccgtctcaggaaaaaaaaaaaaaaaagttccagtaaagcaaattttaaaagagcccacgtgtccaggtgtacctataatcccagcactttgggagcctgagatgggaggtttgcttgagcccaggagttcaggactggcctgggcaacatagtggggctccctctctactaaaatacaaataaattagccaggtgtggtgtcacatgcctgtcgtcccagctactctggagggtggggctggaaggtggcttgagcccaggaggtcaaggcagcagtgaaccatgatggtaccactgcactccagcctcggtgacagggtgaggccctgttggaaaacaaaaatgaggaagaacctatgtggttaatcactattcttgttccacttacataaataaccacaccaggtttaatgaggccaaacttactctgcaatcaaatcaatcttttattatctttgatagaaatgtgttaatttgaaaacaatcctacttttattatctttgatagaaatgcgttaatttgcagccggtcacggtggctcacacctgtaatcccagcactttgggaagccgaggtgggcggatcacctgaggtcaggagttcgagaccagcctggccaacatggcaaaaccctatctctactaaaaatacaaaaattagtcgggcgtggtagcaggcacctgtaatcccagagacttgggaggctgaggcaggagaatcacttgaacccgagaggcagaggttgcagtgagccaatattgcgccattgcactccagcctgggcgacagagcgagactccatctcaaaaaaaaaaaggaagaaggaaatttgttggctgggtgcggtggctcacacctgtaatcccagcattttgggaggccgaggtgggtggatcacctgaggtcgggagttcgagaccaacctgaccaacgtgaagaaaccccatctctactgaaagtacaaaaattagctgggcgtggtggcgcatgcctgtaatcccagctactcgggaggctgaggcaggagaatcacttgaacccgggaggcagaggttgccgtgagccgagatcaagccattgcactccagcctgtgcaataagagcgaaactctatctcaaaaaaaaaaaaagaaaaagaaatttgttgactgtagagagaaaaattatgtttcaaaataaaactcgtgcccccactattagactctagcccggtttgctgtctggaggttttgtcgcccacctgtggtccggaccgggtcctgaacttcagtttcctccaatatttgcctacagctcaccaaaccactctttccaattttttcttccaccattcctcatggagtcactgaaaattaaaactgctcttttcccaaagccctgtaagctgaagctgccccacttgatacagacttcagagaaatttccccagcaactctcgtacagacggctttcgtgcccaggctgggcgcagcagctcaggcctgtagtcccgaggcaggaggattgctagagcccaggagttcgagaccagcctgggcaacatagcaagaccctgaatctcctaaaaaaaaaaaaatttaaaattagccaggtgtggtggtgcattcctgtagtcccaactattcaggaggctgaggcgggaggatcacttgagcctgggaattcaaggctgcaatgagctgtggtcacgccactgcgctccagcctgggtgacagagcaagaccctgtcttcaaaaacaaaaacagaaacaaaaaacgttttcttacatctggaaaacaaaatattaaagaaccgtaatgcttcagacaaaagtcattaaacagtaaacatcctcgtcagttcattcattcccatgtcattaattcttgttctggttgatcctgggacagaactttcatggacctgccaggtccctccttcgagttctggaaatttgcacccaatccaaggctatgacctgaaccagaaacctgtgctccagagcacctgtcagaatccttcccaggaatctctttgaagaataaacaatttgggactagctgattgcaaagctttcagaaaaaatcaaagtaagataataactgtgaatgaccgaagacttaagatagccatggctcaggatctgatgagagtttattatattcgtgacacggttggcaaggaaacttggttatttctgtggcatgcagcattttaatgtaataaccaaaattatgactgataacattgcaccagatttctaggaatagcatgtgagataggatatatatcataggataacgtatcagatttctaggaattttatagagtttctgcaacattcatatcaaaaccaaacccgtaaatagaacctccagaagacttagtgtgacttactatttcacacgctttccatctcatgtagcacatcggataagcctgattagtctgacatctgtctttcacaaggcagaagacaaatccttttgagaaatcctagtacctttccagaaactcccaaaattatttttctttctttcttttttttttttttttttttgagatggagtctcgctctgtcgcccaggctggagtgcagtggcgcgatctcggctcactgcaagctccacctcccgggttcacaccagtctgctgcctcagcctcccacgtagctgggactacaggcgcccacccccaccaccacacccagctaattttttgtattttttagtagagacggggtttcaccgtgttagccaggatggtgtcgatctcctgacctcgtgatccacctgcctcagcctcccaaagtgctgggattacaggcatgagccaccgtgccccgcctattcttcttttaaaccaaaaaaactttcaggtgagtcaaaaccaaaaccaataagctttttatgacttaaccatggatgaaagagacaccttcaaaatcaggtgcaaaggaggcagcccccccagcccggaaccaccccacagacagtagagaagggcccttgtcagcgcaggagtgaggggcgctttccagcactgacccagcgacaaaggtgaaggtgggaaaagccccttgtggacgtggacggtgaaactgagctggcgcctcgggcagtgatgcttgggctggcagagaccagggagagagttctcactggtcataaggccaagctctcaagacacaagacaaacaggaaagaaacacctgcccctgggaggaaagaacccttgagcaccaaaaccaaatttacatgagcgtcccgagccacgcgaatgactttctcccaccaagctgaactgggaagagcaggaacaaggcgtgtttgcctcccaccctcagccgggcactgcagacagacagccagagagcgggctgtggtcagagtcccctctgacctctgctggcttcgtgtcagtctcccggatctcatctgcaggctccagagcaggctgcgtgtcagcagctgagacccaaggcacacacgatggagtaaggagaggagcacacgcgtgtattggacgcagacactccacatttgtgaacctttcctgcacccatcacctcagtaaaccccagggaagcgcgtgggccttgatcccaggtccaggccctctgcccaggcccctcctcagcagggcccggccatgcccgctccacagcagctcaggtcgggttctcgtagctggtgaagctggagagcctctcccgcagggccttgaagcagggtctctgctcggggtccctgcaccagcatgtcagcatcagcttgtgcacgctgggcgggcactccagagggcagggcatgcggtagccggcgtccaccctcaggaaggcctcatggttggacatgcctgcggccgacagggatgagaagagctggggcccacctgcctaccctcccccaagaagccacaccagccatccactgccccttcctggggccttccccgcagcctcagctgccatgccttggcgccacccagcacactgtccactgctaacacctccctctggacagggctccaacaggcagctccaggcaccagcctgggtgctcagagaatggtgcaggtgtggagttcaggcgatggcccgcggagggccctgaagcccgtgggggaggcaccccccagcgtccctgccggctacccaggacctcccccactctgcctctcatgcccagtcagggacagtggggacagtacctgggtagggcacctgacccctgctgaacatctcatgcaggagaatcccaaaggaccagacgtcggatttggtggagtaatggcctcgggagagcgcttcaggggccgtccacttgtaggggatattgtggtcatgggagaggtagacgtcctcctgcaatcagcctggagctgagtgggccgtgggggctgcctgtgccctgcccccgaagcatggacgggcacagcggccgcattgccccagcagtgggacggtgatgaccccactgtctgacccacgcacggccgctgcagctaaggccacactggggcctgaccaccttcaggagcccaacttcccctgggattgcaggtgtgtggggaccggagggcccgggggacagggaactgggaggctcccaggccgtcagaggggcccagggctgggccagtgaacaaggcacgtgaacaaggcagcggctgcgtggtgggccctgctgtgcgtgccattcagaatgggggccccaccggactcacggtggcttcccacctccctgcccagcctgggctcccgagggcaggggccgcatcctgctcccagccgagtccccagctccacacacaggaagcccccagccctccggccacgccccggccacgaccccagccacgccctctgagggccctaccttgataagcctggctaacccgaagtccccaactttgcagagggtgttttccccgacgaggatgttcctggcggccaggtcccggtggatgtaattctgcgactccaggtaacacatgccctcagccacctgccaggcgatgtccagcagctccgaaacgggcaggactttctcatcagagtctgcagaggggagtggagcagagcctggggtcagctgagccagctgaggtggggaagggttggggaggctgggccatgtctcatctgcctccaagctctgcgggctcagaggaggggccggggcaaagggcagctggcctgattgaaaattggaactgcaggccagctaccgcccttctggaaggcaactgtttatcacgaaccaaggagcaagctgggcgtggtggctcacgcctgtaatcccagcactttgagaggctgaggcggatggatcacgaggtcaggagatcgagaccatcctggctaacacggtgaaaccccatctctactaaaaatacaaaaaattagccgggcgtggtggcgggcgcctgtagtcccagctactcgggaggctgaggcaggagaatggcgtgaacccgggaggcggagcttgcagtgagccgagatcacgccactgcactccagcctgggcgacagagccagactccgtctcaaaaaaaaaaaaaaaaaatatatatatatatatatatatatataattagctgggcgtggtgacaggtgcctgtaatctcagctactcaggtggctgaggcaggagaatcatttgaacccaggaggtggaggttacagtgagccgagactgcgccattgcactccagcctgggcgacagagtgagactccgtctcaaaaaaaaaaaaaagaaccaaggagcagttcctagtggtctagcccagcgatttcccttctggaagtttgtgatgacgcgggaggagctggacgcagaaggaccagcgaagaggctcatgactgcgtgatgtaggcagtgggaactcgaacaggagaatggctgtcagcggcttgcggcctggtggtgcctgttttaccccacattccctcccggaggaccctgaagggcgtggggactgtctgagatgatcaagccctttgtgtgagggcgaggggtacggagcctttcgctcagagcgcaaacgtgcgtggtgcctcagtgtagctctcctcagacacacacggcatttttcctataccacaacgttccctcccattctaacatcggaatccaaactgcgccttcacgcacgggcatctccattccctggcagcgattgtctttggttttggtgagaaaggaaataatggaacttagagaggatgaagtctttgagccaatgtgatctgtgtgtgtctgtgtgtgtgtctggatcagtgtgtgtctgtgtgtgtgtgtgtctgtgtgtgtccgtgtgatctgtgtgtgtgtctgtgtgtgtccgtgtgatctgttttgtgtgtctctgtgtgtgtgtctgtgtctatgtgtatgtctgtgtgtgtcatgtgatgtgtcttgtgtgtgtgtctgtgtgtgcatgtgtatgtctgtgtgcatgtgtgtgtgcatgtgtgtctgtgcgtgtgtgtctctgtgtgtctgtgtctgtgtctgtgtgtgcatgtgtgtgtctgtgtgtctgtgtgtctacgtgtgtgtgtgtgtagacgtggggggggggtgtgcactttatttcctcacgtgcccccgctgcctccagcaagagccccggcccatgccactcaccgcggagcagctccagcaggctgcccttggccatgagctccgtgatgatgtacacggggtcccccacggacaccacggcgtacagcgccaggatgtgtttgtgccgcagcttcttcatggcctggatctccgactgcagcatctgctggtgcaggaggttgtctgcggggacgggtggcctcggtggatgcagcccctgaccccccaggccccaaggaagaggccaaggccctgcccccacacacagcagccatcacacccagcagctgtgcaggacacacagacctcctgcccccgacagggcacctggctcccgaggccacgaaatggcagatgcagccggccccacagggccccagcctggcgtacccacggggctgtggtggccacccgatttcttcctgtgcccggcccagacctctgacatagaggccagacctctgctggggcccagacgggttccagggaagttttacccatttccagtgatctattttaatggctttccattacgtcaaggattttaaattttctttctttctttcttttttttttttcccaagacggggtcttgctctgtcgcccaggctggagtgcaatggcgcgatctcagctcactgcaatctccgcctcctgggttgaagcgattctcctgcctcagcctcccgagtagctgggactacaggcacatgcctccacactcggctaatttttgtatttttagtagagacgtggtttccccatgttggccaggctggtctcaaactcctgacctcgtgatccgcccaccttggcttcccaaagtgtggggattacagatgtgagccaccgtgcccggcctaaaattttcttttataataaatgtatttaggtaaaaacataggtgcaattgaaagggaaccactctcgcatggacgctgtgggtgctgcttggggctcgaggccagaggtccctgttggcggggtgggagggtggcccagggcaggcacggggccacacagagccctgatcggggcccactcacctcgagaaatcaccttaatggccacctggacccggtctttccagagcccctcgaagacctccccaaagtagccggaccccagcttcctgcagagcgtgaactcctccctcggcctctcccagtcatcccaatggggcaggggctcaggctcgtgctggaggaagagtcggggacacagggcaggggctcatccttcaggaagtgccagtctgaagccagcacagggagcctggatttagcctcagatttagggccacgatcagcctgggttgggggtttctgagtgtctgacacaagggtggactctcctgggggctgcccccagcccagcatgaaacacccagacagaccggagccaggaccctgcagagtgccgctggcctctccgagagtggccaggcccggggatggtctcctggccccacccccaactcaggcaaacacctgtgctctgcagaaccatgggcttccctccagtgggccccaggtcagtgagtcaggacccctcccatgctgcccggccaacctctcccagtaggaaatgccagcctgtgaccccccagcctgaccccgcgtgaccaagtcagggcggagcggctaccttccggcagggcgcggccagccgcaggccgtgggacaggctctgggccctgtggtagttcacaagctcgggcaggctgaggaaggacaccgcctcgttcaggtgcagccggcccccggcacgccgccagatcttgtagtgccgcacagcctgcgtgtcccgcactgggagggagagcgtgagctgtgtggccaccccaactccgacgcctccctgcgtccccagccctgctggccacacctgcgcagagtttctgggtccccacagttgctgttggtgcttcctcagtaccacccctgcctcccctccctcagaacggctccctcctgccctgcacgctctggccaagctctctggcccctcctgcccccgtgccaggcagccagtggcctccgcctggatggcagctgcctaaaatcccagccatgctgagatcctcaggggcagggatggggtttctctgcgccccgcacaccccaggctcaggtctcatgctgggcgaggttcccatgggtgctgaggacctcccacgagtgcctcgggcagggctggctggagaagcccctgccctcccagggaggggccctgccccacgactaccctagcagccagtgacccaggccccagggaggagcgggccaggtgggcggaggggatgggagctccctggagaggagcccatgtcccccgtctcagccagagcgagccgggttcaccacgtggctgggagggcttagagccaggagcccccgcaggcaagcacaggctcggaggccggggccgcacccgacaggacgtagtcggcactcggcttctcgctgaccctgatcaggaaggcgcccgtggcgttgccctcggcctgcagccgacgcacagcttccgagcgggagatgcagccaaagaaccacctgcaggggaggagtctgagaacacgcggacctgggcccaccccacgtggaccccacgctggccccagcctgcccgcctggaaccccagccgcccttgcctgccacctcaagctcccagccctgaccacagctgctctcaggagctgtcgctgacccagacgccctgaatgtcccgaaaggccaggacaggcccctgaggacccggcgggggcaggggcaggcgctaccacaccctgccctgagtggcccgagtctaggggtcagagcctagggtggagctggggagggcagctgagcaggatggctgcccagagctgcctgcacacacccatgtgtgacgcacgctcacacacacacagtcacaaacccccacacatgcgcacagttcacccgcacacctgaacacacacgcgcatgtgtgctcacttgcccacacgctcacacgcacgcacacacagccactcgcgcgcactaactcccggctgcggggtgtgggccagccctggactgtggacttccaggtggagcttgcagaagctccaggtgacctgcgccctttgtgtgtctgactccctcaggtcactggaacacaaaccccacacagaagaccacggcccagcatggagcccctggggtccaccccctccacttccgcacacctggaagcactgccccacctgcccctccaaccacctggcctcccgccccccccctcacctggcctcccgccccctcctcacctggcctcccgccccctcctcacctggcctcccgccccccccctcacctggcctcccgccccctcctcacctggcctcccgccccctcctcacctggcctcccgcccccccctcacctggcctcccaccccgtcctcacctggcctcccgcacccccctcacctggcctcccgcccccccctcacctggcctcccgccccctcctcacctggcctcccgccccctcctctcctggcctcccgccccctcctctcctggcctcccgtcccctcctctcctggtctcccgccccccccacctggcctcccgccccccctcacctggcctccagccccccccacctagcctcccgctcccccccccacctggcctcccaccccctcctcacctggcctcctccccacttctcacctgggcgagttctcaggactcagggtctttgcacctgggagctgaccagcctccggccagaccccacccctgcacccctgctcactaacgaggtcgtgggtctgcgcgtgaccctgctaacgaggtcgtgggtctgcacgtaatagaggggtctccaccatgggcccctgcccgacggcctctttacagcctcccctgcttgttgcttgggtcccccgggagctaaccctacacagcctgtgactcacgcacacacacagtgggtgcccaatcactgatgagaaacgcgggatctcaggagcgtgaccctcctcagcctgagctccgggcagctgtggaagccagggccaggccacaccagctgctgtctggttccccgcagggcacagcaggcaggaagtttgcccggcagccggcccgctcccctaactaggtcgtgtgtctggttccggcactttggaaactgggcaagcttcaagcttcgtttcccccaaaggccctggaacgctccgacagaccttgtcactggccaccgggccccagaagtccaccctggaccctctgtcctccctgggtcccggcaatgcagcgtccacccccgagctgtgacaaggatgagcccaaggcaggggccgtgccctctgacccccgtgctccaactcccgcagggacagtcctgggcactcctgggcgccagcgcatggggcctgcagggaggatcaagcgggatgcccagcctggactttggggtgcaggaagatggaaccggggtccccaccttcttgggcctccctgagcagcccagagccctgtccctcccctgtgcctagagggtggcctgtgccaaagctcccagcagcctaggacacgcacggttccgactccaccgtctccctctcggccaggtagttgtggggcacatagccctgggccacggccccacccgcctcgtccagcagcgtggcccaccaccactgctcctccttcctggccacgtggaagacgtcccccgcgcggaagctcagctcctcgtccgtccgggacttgaagtcccagaggcccacatacttggggcccaggtgagcctggtcccgggacaccatggcgggcgggcgcagcggcaggaccaggctgtggcccagctggagcacccagagctgggcgtggcaggcgggccgtcccacttcctcatgacaggccgggaagcagccacacccagcacccacaggcgctccagagcaccccggctcctcctgagggcccagccggccccacaagtcctcaggcccactggggcccatctgagcacttagcgcccgcactatgggaacccactgggcaagcaccgccagggccggcctgagcgcaggagagggggaggaggacctcccggttggggcttcttgggggtccaacttatggacactcaggcactcagggaagccaacggccctctgggaacaagcctcgcagcctgagggcaggaaggtgagggctgcaggcgctgccttcccaaccctcagagctgcgggggcacaggtgggggccgcctctctccccgcttccggcagcttcccctccacccgtcggtgccctcacccagccccagactccacccctgagcacagggcccaatgtcaggagctgctgtgggcaggcgtcctgagagcggcctcatgggcaggcccgccctcgggtaagggccaagcagggaagagggagtggaatcagggcagcgacagctgtgtgggtcggcccggaggacttcccggaagaggagggcccgagggttttgggggatccccggggaggcagagccaggggcacccacggctgaagaaacgggcactgccttcctccacacggacgccagggggcaggcaaggaccgtgagtgcggcctggaagcgcccatggcgctggggcccaaggccacaggtccctcccaggcagcccctcccgcctccagcctctgcctcctcctgtccagcccgcaggacccctgcccccttccagctggcctcccttctcccgactcatgcctgagtgagccctgccgtgacccccacctgcacccgacggccgcctgccccccagcccctgagactcgggacaccccctccctggaggcccctccccgccccaccctcccactgaccctactgtgtccacccgggagctccaacccagggacctggactggcagccacaagggggcaggaaggggcgggaagggaaattcaaagtctgcaaggggtggtaaggaaagtccctaaactgcgtatttcaacttttatttttattgcaaagagaaataatggcaccttccactcattgttttgagattaagaacaataatctggattatttaacaggctcatagatttctgggcagcccagctcagcgctgaccaaggtggggaggggcagcggggtgccggcctgggcagtgtccctcaggccctcccagctctgtctggggtcggttggggaggatgcagggggaggggtggggggtggggaatgcggaaggagggtgccggggcacctggccgggcagcgtccctcagagcccggccagactctgggcccgtgagtctatgtccaggaagcctcgagtatccctgagttcggacgtgcaggactttcagtctaagccacaccaggaggcaggaacgtccccagcccctcccagatacccaggagcaccaaacctgttcagctggtggctggcgagatgcctaggagggcacaggtgccacagacacacctggtccccttaatcccagtggcggctgcagagagcacagagggcgaggccttctgtgccagaggagcccccaggctgctgtgctggggacctgccagaactggaagctcagctcaaggcctcagtgggcccaggtaccagaaccagcccctcccctaggttctcccatgcagatggagctgggcaggtggccagggtcccaaaggctcagataaagcctcttgcctccaccatctgcaggggtcctggttcctgctgcttccctccgcttggccttgttcctccgatgcacgggccccaggaagcccccgcgctgcctccgttctcggagcctccgagtggcctcttccttccccggggccacctgtctctgcacacgggagtctcatctcttagctccctcctgagccaggctttggccggggcctgtggacggcagccatcagcacttcggctcagcaggtacagagctgaccccaactctaggggacaaggactcagtcaggcctgaacttgtctccaaactttctgtccccgaaagccttctgggcacagctgccaacctgggctcccaggagggtggggggcagggtctccgggggccacaaacagaccccaccggcccccttgcttcttgacgtgtttcacgaagacctgagcagaagcttccctgagccagacgtggggagacgagggcggaccctgcacatccctgccccctcctgccttggtgacccccgaggactcacacccagaggcttcctgagccacttgctgcccagcataccatggcatctacctccgagcccccaaccgaccctgcctgaccctgcacaggcagaagactccaaatcccccacggcccaccctgaggcccctggaaatagcctccaagggcagctcccaggtcaccaagcctcccggcccacccttcctgtgccacctggaacccacccagggagatggaatcggcagctcctgccaatgcccttggggctcacgctctctgggcaccatgatgtcctgggctgggggtccgggcggcatgggggccgctccaacctgcattttctagccacgtggacccgtacgctccagctcctgggtctgggtttggggggctgagcctgtgtgtgatgtgcgcctgtgtgcgtgtctgagtgggtcagtcccggcttactgagtgctgtgtgcgtgagtgggtttgtgcacaggccgccagtgtgtctgtgaggggcaggtgacggtgccaccccgtgcctacataccacacatccagtggggtcaacaccacggtctgcctgggagtcagcactggtcatttccacaaacccaagctgggactagggagagaactgggcctttggctcttcaccctgggagggagtccaggggacccaggcaggagacacacagggctcagggttcctcacccagagcctccgaggcttctacccaccctcctgtgccgttgtctctcttgagaggccagggacacgtgtcacactgcacggggaacgtcagccccagccctccgtctgcacgagtcacactgcacggggaacgtcagccccagcccttcgtctgcacgagtcacactgcatgggggacgtcagccccagccctccgtctgcacgagtcacactgcacgggggacgtcagccccagccctccgtctgcacgtctgcctggtgcacgaacatgtgtgcacgccagggcctgaggcccacagccagaggctcctcggtccggcagaccggcatcccttcgagttggcgctctgcagggaggaggggctggcctggctggagcccagagcgttgggtcacgtgaggactcaggggtggcatctgtggatggcgtgcagcttctcccgcagcgtggcgaaggagggccgttcctcggggctgctcctccagcactccagcatgagcacgtagacctccgccgggcaggcagccgggcgcggcagccggtaccctcgcatgatctgctgcagcgtctcgtggttggtcatccctgggaggcgcggggcaagagctgcctcgattctgcctgggggtccctatggaggaggcctcctgtagccccccatgtcatctgcctgcccttggccagaccctccaaccccttgccgacagcgtccaggcccggggccagtgactcctgggcagagcctgcatcctccctctggctgcctggggacccaccttcatagggacactggccataggtgaaaacctcgtgcagcaggacgccgaaggaccagacgtctgacttctgggagaagacacgataattggccgcctcaggcgctgtccacttgaccgggatcttggagctgctgctcggggagtagatgtcgtcctgggggcgagggaaggcccctggtagggcaggtggaccggggtcccctcacccaccccctctgggtcaggggcccagagcctccgctgaccttgagcagccgggccaggccgaagtcagccaccttgcaggccaggccgtcgtccacgagcacgttccgggcggccaagtcccggtgcacaacgcgctgctcctccaggtagctcatgccctcagccacctggcaggcaaagcccaggagtggcggcagacgcagggcccggccctcgggggctgcaggagacagcgcggggtcttttagggcacggggccaacggccggtgaggccagcgtccacccacgtcaccttcccccatgcctcagcctcctcatctctaagacgtggcgaggatggcatggccggctaaggccacgggaagccccaagtgagacagggcgagggtcctgtactcaccacagtgacccggcagccggcccaggcccccgacaaagaccagggcagagaagagccagaggctgggctgggtctatgtcacattagaccaaggctggtgacccagatgggaccgcgccccccaccgcccccgaacaccagctccagccccggagccacaaggctctggcctggcccagacctgacgccagccccctgttggctggagaccagacagggatgggatctgcagccggggccacctgctcccggtagagaggcccggttcacctcggaaaccccgcaggttcagctctgcgccaggagggaaggggcggtcgcaggcgcgtcagggccacgtggcagcagggaggggactcactgcccaggaaggcctgcaggttccccttgcgcatgagttccgtgacgatgtacacaggctccccgcccgagcacactgcgtgcagccggatgagccgctcgtgccgcaggcccttcagtgtctggatctccttggcgaggtcagtgagcttcatgttggctgcgagagagggtgtggctccaggaccggcccacgccacgaacatcactgccctggggcttgagggttggacagcaggtgcggggcccggccgtggcgcaggatctcggggcctcacctgacttgatgaccttgatcgccacgggcagggagcccagccacaggccttcccacacctccccaaagtagccttcacccagcttcctcccaagggcgaattcggagtgtggccgctcccacacgtcctgcctcggggccttctgcagggagggtgggcagggaggctggtcagcgtgggcccctgtgctctgtcccaggcacagccccccacaccaggcctctggcgggcacccctgtccccagcacacactcaccccaccctggctgggacaaaggggagtgggtgccaggcttggaggcccggcccagccccgtgggagctcattgctctgggggcctaagtggcacctttgccccagccggatatccgtctacacatgctcattactgcccctggccgcgctgtcattatgagaccagagaaaccagactgctgccctggccctcggcagggtggctcacatcggggacagtccccgggatccagtgtctccagcccaggtgcagcatcttgtgatctgcctctcctcccacaccttccgcccttggggcctggggcagccttgagtgccttccccaaactggccccaccctcctggctgctcccctgcagagctgggcactgctacaggtctcctttccccactcccagccccctaggaccccaggaatcccaacaaccctcagaggcacccgcagagagcagaatgtgctggaaccgctgggatgctccgatgctcccaggcctgggcagggccctggagctgcgcctctgacagccccaggggttttgtgacggggtggggaggagcacctagaacagggccatgcctcgggcccagcatggggcagcttggcaggcacaggcccacctggggcatgcagggctgcagcagggggttctggatcagcttccagttggccttgtagtaggtgagcagctcctccaggccgggaaagagccgtcccttctgcaggtagaggctgccatcagctgccatggagacccggtagtggcagaccttggcctgggcccggactaggaagggttcagagatggagacccctgccttggctgccagctgccccgaccctcccaccccagaggatgctggccacaacccactaaggggtctggctcagacctagctggggaccctgagatggtcagagctgtgtggaggagggagtgtgggcagccacaggctggggcggggcagcgagagcggcccaggttggagcttttctgctgacggtgtgcacagagtaggcacttaataaatacttgtagaatgaatgagtccatgagtcagtgaatgaatgaaggaataaggaaggaaagaaggaaaagtgaatgaatgaatgaacgaataagcaaatgagtgaaagaataagctagtgaacaaatcagtgaataaatgagtgaattagtgagtgacgaatgaacgagtgaatgagtggatgaatggatgaatgaatgagtgaattagtgagtgaggaatgaacgagtgaatgagatgaatggatgaatgaatgaatgagtgaattagtgaggaatgaatgaacaagtgaatgagtgactgaatgaatgagtgggtgaatgactgaatgaatgaataaatgggtgagttagcaagtgcaggaggtgaccagcatatctgctgttgggccctcagtggcgccgggtgtgaatcaggagccagcactgcctagagaccaaccaccccaaggtcaagggccactgacctggtgggggacagaggcaggaggggccgccccaggtacctgacagtgagtagcccccgaggctgctctcgctgggccggatgaggaaggcccctggttcgttgggtggggagaggagcagctgctgtgcctgggtccgactgaccccgctaaagtaccagctgcaaacagcaggtgcggcagtcaccttgcaggcccctcagccagtggccccacatgctctcctccgtgttgccggcagggctgagcccggctgtcccaccgcctcagggagaaggtccaccccgtggactttgagtcccagctcaaggtctgcactgcctcagcccccagtgccggcctcatcctcctgctcagccctgagcatcctcacgttggccgtgggctctccgttagccctgctgggcgtgacctccagttccctgttcatagtgaccgccagccccagccacaggttaacagtcagccctggccatgggccataggcctccaaactcggcttcgctgagcccctgcacagacatggagctgacggcctggtgagctgcccggaagcactgctgggctgtcgtggctgtacagggccatgggcatcacctggctgggcacggcccacctgcctcaggcagttggttagtggagggggcccatgcaagctgtgtcctgaggaggcagcctaagccaggctgtgcaggaggtcaggaggggcagccagtgggcggctgcaggggggttgctgtgcgaacgttcaaagcatcctgcatcccatgctggagagttgtgcccagtacaggacggccctaagcccactggcgtctgttcgcacagacaccccctcggaaaagccaggtgcaggtgagacctctctgaacacggtggcagggtggcagggagctcccaggtgcccactcctcagatgcccacacacgaggagcccacaccgggtgtcgggagaggggccggctgggtctcccctgtccaggtgggccgcccaccaggtcacatctactcattcctgggagccggaggcatccttggaaggaagacagaaatgctcccagccccaccccgtctgcataactctgctgctgaagtccaaggcggggactccacacctgactcagcttcccaccctggagcctcccacttcctggagcttcctgggacccggagagggatgcctgccactcccctgccccagggcacaccccgtaagcaccaggaggaagaagcagagtgagccggtgtcagggtggggctgaaaccacctgggaagcgggactaggagaggacccgaggtgggcctcagagtcaacacaagattcggggctggggcacggccatgccatcctggcagactgggactgggcaagacggaggacacagtctggcacccctgccccggtgacctagggggcaatgggggcagcaggaatagaaactgacatgaccagggccgtggggctgggcttaagttgaagggaatgaagatggagacaggaagaggtgtgggaccagggacagagaggcagcggcctgaggcactgactccatggacgctctgtccatggagctcctcctgcagccagggcccctgccttctggggtctgctggcagggagacgcaaccctctcacgtgtaaagggactcaggtccctcccagcaccgtggggtgtggggatgagacacaggtgtttccccaaaacatcgccagcctcctctgaagcccacatcagggcttgggggtcagaggtgagcccctgtgggatcctgagatgcagaggatgtgtctgaggtctctccctggggcgtggggccaggtgtctggagctaatgacacctgagtgtggttagtcttttaatctccagcctaggcaaatagtcattagctttgcctatggaccgccctgctccaccacgagccctgccctccaggaactgctgaaggggtctgtcctccacacctggggtgactgtgagccccttcccatcacaaaggctgcttgccccccaaccactgctcaggacaagcggggcaggtgtggggtgagggcctggggcccctcagaaggccccttcctgtgactccggcttcacccgcccatgcaacccccaggacgatgtgtgagtgccaaagggcccccaggaggctggaagtggccctgagcaaggctgaccccgaaggtctccagggctcaggccttgcccagctggatgccagaccaaggcagccgctcagagcagccgcactgggcatctggactaggcgcctctgcaacccctgctcacctgccctcacccagagctcctggagcgtgggcccctgtctcagcccccagtcccagcccctgctcacctgccttcacccagagctcctggagcgtgggcccgtctcagcccccagcccctgctcacctgccctcacccagagttcctggagcatgggcccctgtctcagcccccagcccccagcccctgctcacctgccgtcacccagagctcctggagctcctgtcatctggtgcctcccagcccccagcccctgccctccaagcagtgaccgatccatgaacactggactccctgtgtgagggcgggagggcctggccagccaggcagggtcctggaggaaccgcctgctgggtgtccagctggtgcagctgatgctcccccccacaggacctgaccacgcctgccggagcctcctctccctctcggcagcccacagcggacactgctgttttcctaccacacctgccggcccggggcccatcagctgtccctgaatgaatgcgtggatgaacgaatgaatgaacagatagccacggacatgcgatttccaactcaaaatcctgccgttgttctggactccccagctgggggcgaggcaggctctgactccgaggccgaggtactcacggttggtctgagagcgtctcaggagaagccttggccacgtgggtgatgggcacgagcccggcgctgggctggcccgaaagcctgcgtgcgaagatgtagccgcccccctcttcgagggcacagagcctgtccccgcggcggacactcagctccccgccacaccgcgccgtgaagtcatagagcgcaaggaagagctgagggaaggggctgcaaggctcggcggggagcgtgggcactgggtcagtgttggggtccagggacccgggggtgccatggtccggctcgccgcccgccggccagatcttgtcccagaagaaggacaggaaggccagccgcctcctgaggaacggctccatcccccggggtcaccacgctgggcccgagggccatgggagcccgcgagcccggaagaggaactggcagggccggtgggacccggtgtccagcgctccctgccctggccgtggggtgacaggggaccccggccctgcggtcactcagaggtcccctggatccaggaggcacacggttcccaccggcgtccgggctggcgttggggctgggtggggcgcagggcggaccccctgcctcaggcacaccgacagcacctcctgtcctcgacctccttggcgtctggagtgcaccgtcccctccccaacccgacggcagagggcagcttgggctggggcgggggcgggctccaggaggggcccgaggagggcggggtgggcagggccagcctctctcccgccctctgcaaggcccaggcaggcggaatggctctgcccagtcaggcctggcccatgcccaagggcaccacagtccaacagccgcccgtgcccacggagaagtgggggttccacggagaagcgctgctgttcagcacctgcagtggttgccaagcctgagctgcactcaggtgaaaaattgcctgcttatttaagtgttggccagatattttaacatcattaaccctgcaccaggtgccgagcctccggcctctgcagtaaattctgaggacaggcgagtgagggggctctcagcaccccggctttcatgcagtaaaacgagatgctgattgcagggagctcggccgcaggccaggcacccagatgccccatgctgcccgatgaccggcttctgagtcagtcaatgcccaggccatacccaaaggccactgcggggaagtggaggctgcggacgcctggccccagttcagggggatgagcacacggagaaggggcggcgggtgagtccctggctggggacctcccaccctctccctggacagcgccaagcccccgcatgctgaagcaaactctgcccgctcaggtaggtccccagatcggggcaggactgggggagcaaatcccagcaaaacccagcagcacggtacagggtcctgaggcaggaggatggggtggtggccatctgcagtctctctctcctcccacatcccctccgggtcctgagtggggtggggtgggggccatctgcagtctctcactcctcccacctcccctctgggtcctgaggcacgggggtggggtgaggccatctgcagtctctcactcctcctgccggcctcccccagcagccccttccgcacctgggtggccttcagggagcctcacgcccctttcccacatctcacacgcatccatgcccccacttcatgcgtgtggctgaatgcatccctccaataggcgtgaccagtgtccagccaatgacaagcccctcgcacctgcctgccctggagtcacagatgggcttctcagaaacctcacgtctggggactggtgtgtgcattgtggggtggcagtgacacccgtggcctggctctcagggcaccccagcagccaagctgtgtccgggctgatagcctggagccagcaggggccctgggagactggacatcgccaggctcagggcaggctctgcaccagagaggtgccctgctgggggtggtggggggtgttgagaaatgtggagaattgtaaatactacattgggggtggccttcgaggggccccagcgccttctcctcccgcgcttccccccgccgccctctcctcccgcccccgccgccctctcctccccccacccgctgcccgtctcctcccgcccccgacgccgtctcctccccacaacccacccccgccgtctcctcccctccactccccccgccgccgtctcctccccacacccaccgccgtctcctcacgtgcaggtgaggcttttgcccaccatttcttttctttactttttttttggaaacagggtctcactctgtcgcccaggctggagtgcagtggcagcctcgatctcctgggctcaagccgtcctcctgccggactacaggtgtgcgccaccatgcccagataaattttttattatttgtagagatgggctctcactatgttgcccaggccggttttgaactcttggcctcaagcgatcctcctgcctcccaaagtgctgggactacaggtgtggctaccagctctcccaaatcctccctaggacgtgactcttccccgctagaacgccaaggccgcagagccccagggaggcctcctcaggccatggaaagctcctgtgcccaccacaccagggtcagatgttcagggcactgaatgcagattcctcccagacactccctgccccttagagccacgggatcatggcacaggactcagcacattccatgcccagctggaaccagaggcaggcctggccatcagggttagggccccattgggcctctgccccggcgtgtctcacccccaccgccccacctgcccacagatcagctccccacgtctgccccatcttccccctccttgcacctgctgcccttgcaccgcacacatgccagggtgagtgtggtcggcaggcagccgaggccggctttatccagctcctccccggtggtcctcagaatccccggccccgcatgcccagctgccctgtcccgctgccctccaagttgtgcccgcccgtccaccccttcctcacctcacccaccaggcgcaacacagcccagcatagggcccctgccaggtgtcggtgtcagcagccccttccctgcctgctgtgccccccccacatgacctcacctcctccctcagccctaaccgggtgggtggcacagaggggagtgaggaaaggggcctgggtacaggatcagtctggacggggtcaggagtctggggcttggccgggtgaggcggctcactcctgtaataccagcatctggggaggccaagcaggaggatcgcttaagcccaagggttcaagaccagcctgggcaacatagtgagacccccatctctatttttttaaaaaaagaaaaggctaggcacggtggctgacaccagtaatcccagcactttgggaggccaaggcgggtgcatcacctgaggtcaggagttcaagaccagcctgggcaacatggtgaaaccccgtctccactaaaatacaaaagttagtcaggcatgatggcgggcacctgtaatcccagctactcgggaggctgagacgggagaatcacttgaatctgggagacagtggttgcagtgagctgagatcgtcgcgccaccgtactccagcctgggcggctgagcaagactccatctcaaaaaaataaaaatgaccagggctggaatcctgctgtcagactcactgtccacatgaccttgggcatacagtgctgaacctccctgtgcctcagtttccccatctgtaagagcactgagcttacaatggcagtgaggacacagaccagggggatggggtgcagggcccttcctggtgttcagatggaggcttgtggcaggagctctgccacatcaggccaccccccatccgggtttatgtgtctggagggcacagctctgagggtctcagtggtcagcgtgcattctctcccccaagactggccccactacccccaggcttcaccatcctcagggcccagggaagagagcttgtccccaccagggacaacagatccaaagtgttcactgcccgtgccctggtggccacaaacagggttgagcaagactgagcacaaactggcccctggtgcccagcagtgaacaggagtgactgttgaccctgcacagaggggactatgctgagcgcaagaagccagtcccaaggctgcatactgaaagcctgcactgataggacattcttgaaatgaccagacagagccggagagatgagtggttgcagggctagggagaggtgggagggagcagcgtggctgtaaagaacatgtcagggtcccgtgggggtggcactgccttgcgtctgtatcgacgtcaaggtcctggcgtgattctgcactgcagtcctgcaagatgctaccactggggatgctggatagagggtaacgggacctctgtgttacttcttacaactgcagatgaatctatacttatcttaaaagtaaaagtttaactttattattattattattattttcgagacaggcctctgtcttattgcacccaggctggagtgcagtggcacaatctcggctcactgcaacctccacctcctgggttcaagcgattctcctgcctcagcctcctgagtagctgggactacaggcgcccaccaccacgtccagctaattttttttttttttttgagacagagtctcgctctgtcgcccaggctggagtgcagtggcgtgatctcggctcactgcaagctccaccttccaggttcacgccattctcctgcctcagtctcccgagtagctgggactacaggcgcctgccaccactcccagctagtgttttgtatttttagtagagacggggtttcaccatggtctcgatcacgtccagctaatttttgtattgttagtagagactgggtcttactatgttggccaggctggtcttgaactcctgacctcaggtgatctgcttgcctcagcctcccgaagtgctgggattataggcgtgagccactgcgcccagccattattattctttttagagacacagggtctccctctgtcacccaggctggagtgcagtggcaccatcttggctcactgcagcctcatcctcccaggctcaggtgatcctccggcctcagctttccaagtagctgagaccacaggtgcacaccaccacacccagctaatttttcaaattatttgtagagacaggggtctccctgtgttgccgaggctggtctcaaacttctggcctcaagggatcctctcaccttggcctctcaaagtgctgaggttatgggcctgcgccaccgagcctggccaaaagtttaactttaaaaaattagattagaaatcagaaattgaaagaaagggggtagggtggagcccaggagaggggagacatccaggacctgcctggccccaaaagagaaggggaggctgctctgcccccaccccgcttctccgtcagtgggctgcagggccgggggtaaggggtctaactcctactgcttcccaaccctccgcgtcagacagcacccccttctccaaacaaccccggctttgtcccctggagccctaaataacaataacaatagctggcatttattgagttccagcccaggcagggagggcagggcagaaacagcacccaacaggactgggtgcaaggctcacacctgtaatccggaaggatcagaaagacccaggtgggaggatcacttgagccccgggggtgaagactgccgcatgggtgacagagcaagacgctatctcaaaaaaaaaaccacccacatccacccacttcctgccaggcctaacccctggggcctccatgcaccaagggaaagctcttccagggtggggtcaccgggaggaggggggaggctcaagttacagaacagcctggtaggggctcaaagacgcccatcctggaagaggccccagcactgacctccgtgggggtggagatgaggaggatggaaagggtgtcttcctccagcatcttcctgaaggtgaaggaggggcaccttggggtgtctaagattgtgaccccaggagacccccagctagctggggtgtgctgtgggggaacggggggatcccagaggccctgagcccaactgaacagatacagacgggaccagatggcctcagagctcccctgcggggctccctggagctatggagaccccatttatccagagtcaggtcggtgcctgagcttgggcagccccaggtggaaggagcccatggtgggaggagcctgtagtgggaggagcctgtagtgggaggagcctatgatgggaggggccgtggtggggggagcccgcggtgggaggagcctgcgctgggaggagcctgtggtgggaagaccctgtggtgggaggggccgtagtaggggagcccgcggtgggaggagcctgctctgggaggagcctgtggtgggaggggccgtggtggggggagcccgcggtgggaggagcctatgatgggaggggccgttgcgggggaggggggagcccatggtgggaggagcctgtggttgaggagcctgcggtggggggagcctgcggtgggaggagcctgtaatgggtggcatctgtaatgggcggggccttgctgggcagagcccgcggcgggggaagccgcccctctcctctgtccaggcgctgggtggtccatccgcctggtcaccggccactgcctctctcccaaattcctccgagggattcccgaggagtgcgctcggactggggggttgagcaggaactccctcccagtcacccgaggctcctgcgccccgcccgaagccgggggtgcgtggggagtggtgcgcccgcggaagggctccgggacgggaaccccccttggagcctggctcttggaccagccacccgccgtggcccctcagtcggggacgcgggcccccagaagtctggggctctccaggaagcgaagcggatggaagattactcggctcggggtcccgggtccccacccccgccccgcccccgggccgcagcgtcacaaaggccgctggtccccagggcaacccgcggagtgcggagggaggctgggctctgggaagtccgcgcgcggctccgcttcagaggcagggcaagtgggcgcggtcctggggcggcggcgggggccgggagaggagggctgggggtctcgagaaggtaaggggcaggcagagcggccggggaggtgggcccgggccaggggagccaaggggagtgtggtggagggggtagagtgcgggcacctggtggtctcagggaagcgggcctgggaccggggcgtgtaggaagcagcgaggggctcagaaccacctttccgggttcacgaccagcctctctgggtgttccacctgggcagctgctggagactagaaaacatccctcacacgtcacagaggcacggtttccctccagcggtgaaatccgccccagcctccagcaagagcagggcttaggcctggggtcctggggtcctgctctcagctggcacctcaccccagacacactccctgctgcccccaggggcctgttctcgagggattcccgaggagtgcgctcgtgaagtcatatctgcctcacgcccaaaagggcaacccttcccgggcagatatgacttcaccacgtacctgtgtggccctggggaactcagcaactgcttagctctcatttgtgggtcgtccaaggcccaagtggctgtgacaacctgagatctccagggttgctgggagccggggcagcaaccaggggtgcggcttgctctccagggagctgcggcagagcctggggccacagctgcactcagccggtgcacccacggacagagggtcagactcggctcagcactgggctcaagccctggatgagaacaagaaccaagcttcttagcctcaggctccatctgggaaatggagtgtcacttgtggagtccatgagctcaccagggacaggatcccgggtccacagcgagggcccacagcgtgggaggagggctgctcctccgggcccaggcctgggcgccctcctcccatgctgaccagccagctggcctcgtctttggtgaggcctgtctctgtgccctacaactgcggtgaggcgtggagcgtccccagggagaaccggagcgggaggatggcccgcgaatgtccccgagggggatcctgtgctgcttaggaccacgccgtcccctctccacggccccgaggggtgccagcaacccctttcagcagcagggttaggaactggggcccttgcaaggccacaggtcaggcggttctggccagaagtccgcagtcctagttcttccctgtcctgtcccacaggccactggttgtcagtagaggtttttgcccctcagtataaactgtgtccagatctgtaggctgcccatccagccctccaggcagcctcttcccatcgagttgtgcccccgaagaaggacagaggtccagcatggggtcagtgggctgaatccatcccccgaacatgccacagcccaggggaggccagcctgcctggcagctgacacccagccctccccccagctcccggataatgagcacccatgtggcaggcctgggcctggacaagatgaagctgggcaatccccagtccttcctggaccaggaggaggcagatgaccagcagctgctggaaccagaggcgtggaagacctacaccgagcgccgcaatgccctgcgtgagttcctgacctcggacctgagtccgcacctgctcaagcgccaccacgcccgcatgcagctgctgcgtaagtgctcctactacatcgaggtcctgcccaagcacctggccctgggcgaccagaacccgctggtgctgcctagcgccttgttccagctcatcgacccctggaagttccagcgcatgaagaaggtgggcacagctcagaccaagatccagctcctgctgctcggggacctgttggaacagctcgaccatggccgtgctgagctggatgccctgctccggtcgccagacccacggcccttcctggccgactgggcgctggtggagcggcggctggcggacgtgtcggccgtcatggacagcttcctgaccatgatggtgccggggcggctacacgtcaagcaccgcctggtgtctgatgtcagtgccaccaagatcccgcacatctggctcatgctgagcaccaagatgcctgtcgtgtttgaccgaaaggcgtcggcggctcaccaggactgggcccggctgcgctggttcgtcaccatccagccagccacatcggagcagtatgagttgcgcttcaggctgctggacccgcggacacagcaggagtgcgcccagtgtggcgtcatccccgtggctgcctgcaccttcgacgtccgaaacctgctgcccaaccgatcctataagttcaccatcaagagggccgagacctccacgctggtgtacgagccctggagggacagcctcaccctgcacaccaagccggagcccctggaggggcccgccctcagccactctgtctgagagatgattttctaatatttatccactaataaagaagagtgtaaatgcacatatggaattaaagaagcaaacctatttatgttttaaaggcagcagccaccagtgtttttcctggctcaaaacatgccaagccccaggccttctgctcctgctctttcccagggggagccacaggccggacctcccaagacagctgagcctggagcaagaagtaccagcccctgacacctacgggtccaacgacgacgacaaaagctgctccacggggcctctgcggtcctagcccccgcccctcctcaccacccccatcaccgtgaccgggctccggccttccttacccacctccctggcttgtggggctccctcagggaatgacactcctaggccgtgatgcctcccaccatcccctgcccagcctcgagtgctcatcagcacgcccgcccgaggaggcagcagcaccaccggggatccctggctgtgagcagctcagccgtgcccctccatgccccgccccaccttttgttcctcaagggccttcccggccctgagctccctctctcctccaggatcagctgcttttgctaggcgtccagcccctgcgtccccccaccgctcaccttcagggccgcagctgccccttcctcccagaagccttccctggctgcaggctggtgaggtccccaagtcccccttcctagaggcgccttctcatcctctctgcaggcacttctcaagctattgcagaactactcttatttcatgacggtccaagaatagacatggtcttcaaggcagggcccgtccagcacaccaacggggccacagtcctggagactccatgctccacccctccctccacagatgcccagaacctcttttcccacagtgaccatagcccccgcgaccatctgacccccgagctggctctgggaggccacaggagcccctgtggacgcagccacaaatgggccaggtgcggagggaccccagtccacagcggccagggggtcctggggagcagctttaaaagtgggaccagcaggacagtcaaggctggtggcctcagggactttggacttggccagcctggtgacaccggagcagctctggagctgtggcttgtccccaccacaccaggcacggccctcccctccccacacaggcagccggagacaccggccctgcagggggggtcgctgccctccccacgctcctgcgcccagcgctctgcagtgggccctcgacggcctccacggccgcgtcccaaaaccgccctccccacgcccctgcgcccagcgctctgcagtgggccctcgacggcctccacggccgcgtcccaaaaccgccctccccacgcccctgcgcccagcgctctgcagtaggccctcgacagcctccacaactgcgtaccaagcacagtgaccatccacttttgccccccagccagacctcaaacacccagaagtgagaagagctttcagagtggttttatcattaaattaatatctaatcacataattcaaagatataaaaattggaatgtagaaggtggggcaagcccctccctcaggactggaggcggcagcagggacagagccgcactgaagcgggtgagcgtgcgagaaacatacagccgagcaggctgccccgaacactcagtccagggtggaagcatcgccccggcaccccccaacccccgagcccactgcgcagcccacaggaagagtgcaggcttttcacatttcagagggtggggtggggtggggtggggcggggtgggcccctggctttgggctgccctccagcagcccctgaaggacacaggcggtgatggtgggagaaaggccccctctcccagggaggcctccttgtcctgagcttgggctgaggtctctgttccagtaacagatgctggttttgttttgtttttttttttaagacagggtctcgctctgtcacccaggctggagtgcagtggtaccatcagagctcactgcagcctgcgcctcctggagtcaagcgattctcctgcctcagcctcccaagtagctgggattacaggcgcccgccaccacgcccagctaattttgtatttttagtggagacggggtttcaccatgttggccaggatggtctcgaactcctgacctcaggtgatctgcccgcctcggcttcccaaagtgctggattatgggcgtgagccaccacgcccggcaggatgctggcttttagttcatttaaatagaaaataaacctgaactccacagacaccatccagagtgattacaggtggcgtccaaaggtcaaagggcagcctccacagggtttccttcctggttctgagacttcccagggacagcagaacttccttgcactggtcccaaggaagcccctcttggccaccctgagaggtgttcctgtccccagatgcccaggaggagcaagagtgtggggaccggcccttgccgttcctcctccaagtccacccacttcctgccccagggagatcctgaggccaggaggcaggctggcccaggcaggctgatggcggagggtggtggggagggtgggggggccctggactttccctcccagtcctggcaccttgcaggtggagagggctcttcaggaaggcatagttggcctcctgcagacgcgcacctggccggcaggcacgagggtctgctgagcctcgcagaagtccaggaggctacgccagagggggcagcagcgcagaaggaggtggtctcctgtgagggtgggagtcagatgggagtcagtcagggtcaggtgggaggagtcagggtcaggtgggaggagtcagggtcaggtgggagtcagtcagggtcaggtgggaggagtcagggtcaggtgggaggagtcagggtcagatgggagtcagtcagagtcaggtgggaggagtcagggtcaggtgggaggagtcagggtcaggtgggaggagtcagggtcaggtgggaggagtcagggtcagatgggagtcagtcagagtcaggtgggaggagtcagggtcaggtgggaggagtcagggtcaggtcggagtcagggtcaggtgggaggagtcagggtcaggtgggagtcagtcagggtcaggtgggaggagtcagggtcaggtgggaggagtcagggtcagatgggagtcagtcagagtcaggtgggaggagtcagggtcaggtgggaggagtcagggtcaggtcggagtcagggtcaggcaggagtcggcagctccctagcccagccctggcctcacctgtgttcccaccctggaagagcccagccccgccctcaccgatcaggcagagcccctcctgggcccgcgtgacagccacattcacttggttggggtccacaacgaagcccagaaacttcttgagccagctcttggtgggccgctggtccaggtcgctcttggcacaggtgcggacggtgctcaccagcacatagcgccactcgctccctgcgggatgggaggtgaggccctgctgccgctgcgcccaccctcccggccccacccacgagcccccagcctcaccctggctcttggtgatggaggacacggccaccccggcgatgccctctcgccgaagggccttgctgatctcagaggcctgcgcgttgtagggcgtgaggacggcgatgtcctggggctctacggtcctccccagggtcagctgcttggtgatacggacctgaggagccgagggggcaggtggagcggaccctggtgtctctcctgccctcctccaggaagccctccctgactcacaagcaccagacactcaccacctcagccacctcctccagaaagccctccctgactcacaggcaccagacactcaccacctcagccacctcctccaggttggccttggagttctcattcccttcgtccgtggacaccagcaggctccgctcgtggccctgcacgtggccaaagatgacagggcagctctccttgccagcgtggcccaggacactgggcggcctcctcaggccctgccacgtcttcagcttgctcttgtagaacgccacagaggggaaggcacagatgccctcatgctgcaggcaaggatgtgcgctggtcagaggctgccacgcggggttgtggccccccaggggctgcaggtgggctgggggctgagtggggcgggctcaccatgcggtactgagtgtccagcatatgtgcgtcctcgtggtaccgctcgaacagagaccggtccagacccaggttttgcagccgctcattcttgaccacaggccgcagctgcttgtggtctccgagaagaaccacctggaggaataggcaggcctggccctgacacccctagacccagagggaccccagccccacacgacacccgcgtctgcacacacagggcaccccaggtgggagactgtgccagggacgcctgctcatgctgcccacaccccccgccgaccaaccttctcggcctgtgggaactgcaccagggggatgagggtttcaggttccgtggccatgcctgcctcgtcaacaaggatctgcctcacgtccaggattttgaggctggcagaggctgcacaggagcaggtgcagaggatgacctcatgccggtccagctcgaacttccgagcctcccacaagaccttcttgtacctgccggggacactgcttgtcaccccagggcccccatgctgcaggcagctccaccccctggcccctgccacttaccagaccaggtcctccctggagaagagctcccctctctgcagccgggtgtcaaaggccttgatttccgacgagtaagggttgggggcctgccggatccggtggtgcagggtgatgctcctgggggacaggacacagtgagccctgtccacgcagggccatcacgggggcagagctcagtgagacccacctacacaggactgtctggacagctcggccccactccgcccaagccccaaagacagcaggcacacctgaggctctggttcggcctcccctcccgggggctcttcctgagcagcttcctgctgcccacacgcggcactgggaactcgctggcctcagcctgctcactgtacacacggaggggcttcagctccatccttctcaggagcagtcctgagggtagttgggggacgtgagtcctgccccgcgtgccagctccccaaaggcccccaccgccgaccccggcgcacctgccaggacatccaccgacttgttggaggggccgcagtacaagatgcagggaccccccagccgcttctccccacggggggggcctccgggctgcacctgctcctggtttgatttatgaaaccagaatacgatgtggaggcccacgatcgtcttccctgtacctgcagccagagaataggagattgtagcccaccctgtgggtccctgtggcccaaggcagcctgcggctcccccggcatgggccctacctggtgggccctgaatgaccgtgaaaggcttctccagagcctccctgaccgccacgttctggctggggttcagcttgtggcggcctccggggatgttgtaggtctgccgctccaggaacctgctggggatcactgagagggggcagcctccctgagcactcatgcagggtggggctgggggccagaggggaagctggaggggtggggcagacctacctctgcagaggggctgcgggacaggccggcccagtgcgatgctggtgaccagcggggacgcctcctctagtccacgcacggcttcctccttgcggctgggggtgaaggcagacactggaaaaccaacaggactcccaggaaaggggctgctgccccacgagctcccccctcctgcaagtgaggggcccggggcggtcccccagcccagcctctgctggtggaagccactcacagatcaggaagctgcttgggcagcagctcaacggtgaacagggtgcccggcctcagcacctcttccggaaccttctccatgcccatgtggtggacgaagaggtgcacccgtctgggagcctcctgccggtctgcccggcgctcctggtcccagtcctgcgtctgcccgtgggccacccaggtatacgtgccggggtcaacattcaggccagggccgaggctgctgggcccagggcgtgggctggccgtgggagccggcagcccctcgagccggatgcagaggtagcagcagctgaagttgatgtcggcacagttctcctcgaggaaggcggcctccaggcggaaggcgccctgcagctgcccctgcggcgtccgtgacgcctcccaggagacactcaggtgctgaagtgtgacggagtcattctcggcaaccgcgccggtggccgactccagggcgcagaatggttcccacacgcaggcgtactcatccacgtcgcggtaccggtccctcggggcccggtacacacggcctgagaagcagtctccgggccgctccacgtgctccaggcagaggctgaagcccggtgccaccgtccagagctgagggctcggtaccaggaagccgtgctgcaggctggtgccgagctgcacctgcagggtgtccccactgcccagctcccgggccacctccaggaaatggccacagtggctccgctgcacctgcaccagctcccgccgctgggacgcctcgcccttctcctggatgagagcagccgcctccggccagcgctgcagctccaccagctccagcagctgcttccacagggccgtctccacggccagggtgtgtgggtccggcacagtgccaggcagtggcaggggcgggctggatccctgcgctgagtagacacggcgccgccacaggagccgcaggcccggccggcctgccagggcgtgggggtgctcggccagctgcagggagccgtaggggacggggcaggggtcaggcagcgtctcccggttgctggggaagagcagccggaagcagcgggagcccgcctccacgtccaccacgaagcccagcttgtccagaggctgggccttgagctgcacggccaggtgcaggctgcgcgcccgccgctgatagctctgggcaagtgcgtgctggaggctgaaggcctggcagagcccatcgatgtccctggcagagtaggcagagcccccatggcccagcgccagcaggatctgccgctgcaacaccacgtccaggtacctgcggatgggcgaggtggcccacgtgtaccagtccacctgcagcgagtagtggccgccctgctgctggtggccccgggcgcagcggccgaacgccgagcgctccagggccttgcggaggtcgcggcctgcaggagccaggaatgggtgcatgtcgtccgtggtgaccaagtccaccatctgttcgtagtcctgggtgcgggcagcaaactggacctgcttccagagggaggccaggaggtgcagccgcgtgtcggggggactgcccccgccgccgtgcaggtggtggccgaggtgcagtgacaggggcacccggtccccatgcttctcacacagggccttgagctgctggctgcggggtgctggctgccaccgcagaggcgtgaccgtccgcgtgcactcgctgcccaccaggaactcagccacgagcctattaaactgaatcatgtactccttcaccatgatgtgggccgcgcggaagcccagggtgccgtcctcgtccggctgctcatagaagcagtcggaccgcaggcggtgccggcgcagcagccgagagaagtagcacgcggccacgacgcaggcgtccacggagtccaggcgggccggcagctcacggccggcacccgggtgctgcctgatcacctcctccgcctcctcgtaggacagctggcggtcagactggaccacggagggtgcaaagcgcaggctcttcagctggccactggccttctccatggtgaggaacagggagatggccaggcggtcccggccaggcaggaggctgaggacgtcctggcagaggctggccggcagcatgggcactggctccctgccgggggcatagaacgcagcgccctgccttcgcgcctccacgtccagcaccccgtccctgggcacgaagctggccacatcagtgatgtgcacagccacctcgcacctgggacccaggtctcggacactgagggcatcatcgaggttgcaggcgccctgggggtccacagtgaaggtcaagaaggcgcggcagtcctctcggcggccggcaacccggccaagctccgtgtggtatttctgcagcaccttggtgatggtggcctggtccgacgggggcaccctcaagctgtactccaggccgaggatgcggaggccctgctcccaggtgctggcctcaggcagcacctcccggacgatgcccagcgggtagtagaagccttgccgccacaggacaatttggacccagaagagccggctgtgccgggcctcggcggtgagcctctcaagccccacacgctgcagccggcccttccggaggctgtagatggggacctgcgatgggtccttcagctcggccacgaagatcttggtcacggagccattgatggggaccatgatgcgcgggtcccacgtgtccatgcggcacacaaacgccagctcgtgcctcttcctcttcagcacgcccagcacgcggccccgaagccgcccctcgggcgccttgtctcccgaaaggagctgcaccagcacctcatccccggcgaaggccatcccacagtccaggcggcccctgacctggatggggcccgaggaggcatcgtccagcgggatggctgacgcccgctcgaaggtctctggcacgaaagagcagtggcggtaccgctcgggctccgcgtgcagcagcttccgtagcgcagccgggggcaggttctcgtacagccgggcctgctgcagggactcgggcctggcgacagtgtccagcagcccgtcctccccgacggtcaccatcaccttctggctctcgtccagaagctcccgtaggatggcgtcgtcagcgttgagctccccgtcccacggccagaagtcagcctctgcatcctcagcctccgtggactccacgcccgctgcagcagccgctcctgccgcacaggccccgggcaccacgtcttccttcactgcgtctcctgctggtgctgccgcagcctccgtctgcgctgtggttgccgtgatgtcacgggatgctgggctcagagcctcatctcccggctctgccttcaccatggccgtcaccacagccgcctgctcctcggccaggtcccctactggctctggggcagcctcccagttccccgctgccccagcctgtgtgcctcggggaggccagcgccgtctctgcgccacaccctgctcgacctgctccatggacaggccctcggggcagacactgtgccgctccacgcactcacggatgaagctctcccagagcttgccgcaggccccgaaggagcagagggccacggcgtcccccactaccaccagctgggactgggcgcgggtcaggacggtgttgagcacgcgggcgtcggtgaagaactcaggggccagtgccccagggctgagcaggctctggcaggtgtgcacagtgctgagcaccacgacccggaactgccgccctgcagggggcacgcagtcaggtcaggctgggtgcgcaagacggtgggaccagccccacccctgccgatgccaggctgaggagtgggccgagccacccggggtatcctggggcagctggcagcacctggccccgctggtcacccacctggcaggatctcaaaactgccgacagacacctggcctaggtcccgcctcctcagctcctgcctcagtgcactgacctgaagacgcagcagggccggggatgagtgctggacgcagtgaggactcggccacccccgacaaggagagggcacccccaccaagctcggggatgagcgcaggacgcagtgaggactgggccacccccgacaaggagagggcacccccaccaagctcggggatgagcgcaggacgcagtgaggactgggccacccccgacaaggagacggcacccccaccaagctccagacacctcaggggccgagccccacctcagccctgggaggcaaatactgcagccccctcttacagatggggaaactgaggcgggggctcgtccatcagccggagagctccccctcccccagcaggggtgcggtcgggggctgtcccgggctggccgggctcacctgggcaccgtgggaaacgacacagatgcacctctgctcgcggccgccccagcagctgggccaggtgttgtaggcctcctgcaccttctcgacgacctgcgcaatctcagccagattcagccaggacgccatggacatgtcccggtctgggctgcccgccacgtggcagaacatgagcgggtagtgccgggggtggggcggaaccttgcccctggcgtggatggggttgcccttggccacgtagaagtgccgcgagatgaagctgacaatggcgtccgtgcagcggtagttctcgtggaagaccaggcggctctgccgcgccacctcgtgagtctcctgctggtagcacaggaagaggcggtgcagcagcgtgtgctcggccgcccgggccctggccacactgaacagccggggtgtgacctgcatgtggtcgcccgccagcacgaggcgggtgccgtgcgaggcataggccagcggggtgagggcctcgcactccagcatctgggccgcctcatcgatgagaatgtgggagaagaagccgaccggcaccctgagctcacgggcctgggaggtggtggtgaccaccacgcggtgccgcgccagctctgcccgtgtgggcgggcggaaagcctggcggtcgtcggtcaggcaacagtactgcagcgtgactgggtccgtctggctcagcggccggtccgtgtacatcacacggagaggagtggcctcggggtggccgccgctgacgtggctgtggaaatactcccggatgtagatgtcggcggcactgcgggagggggaggagctcatgggcttcttgctgggggcctcagtgctgtccgctaaagcacctactgtgtgcccagccgagctgcccctgagcacagcccttgtctggctgtcagaggtgagcagcaaacactggtgtccctcctgtcaggagtccaaggggcaagaggccacggagggcttcaggcaacacctgggcgagcccagcggctcctctgacactgcagacacctgcacctccctggtccccagaacccccaatccagaaatcagcccgggacgtatggccactgtcccaggctcttcctcccactccccactgggcagggatgggaaggccccggcctggggaggtggtggtggcaggaaccagaggaaaccacataaaccaaaggggaaccttgtggttaggacaaagatctgtgtttctataaaaacgaaaaacaagactcatccccagaagtcctgggtgggccatgctgcagccttccccgtgacactctccttgggccagggccccggcagaggcacccagctcctcacctgacagcagacccggccaccctcggtgccctgagctgggcctgataaagccaaagcccaaagctggtcggctacagggagtgcagaatcagaggactggagcacatccagggggtgaccgcctgcccggtgtagacttgggccgggcgtcaggtgaggtgggggcaggccaggctcgggcttacctgttggtgtgtgtgcagatgagcaccttggtttcaggcctccggatgacctccagggaggccatggccagcgtgtaggtcttgccggtgccaaaggggccatagatgagtagcggggggacacgcctcccatccccagggccccagcccgcgatgagcgccacggccagctcctgcttgcggttgccacgccgcaagggtgggacagaccaaggtctgggcagggcgcaggtgggcaagtcgggcaccaccagctgctcctcaggcagtgtgtccactgcctggtgccagaggcggaaggtcatcgggtcaatctggaactgcacctccaggaccaggcgggcctcaggctgcagccccagggccaagcagcagcgggccggaagcagcagccacagcgcctgctctgagctggcccgcctctccagccgcacctcgaacaccgtattgtcgggtgcaggtacaggggccaccagggctgtgctgaccgcccggcccagcaggaagccctggtctgtgtctggcatcagggaggaggggacggggacctctgcgtacagtgctcccggaggcgcgaagagcatgttcagcgctggcgtctgcaatgccgtcttcaggaacacctggccccgcagggtcagcctggcaggatggcctgggtcagctcatggggccacagctgccagccccgctgccaagtccacgcccccatccgctcccgttgccccagccgctcccattgccccagctgctcctgctaccccagctgctcctgttgcccccagctcacttggccaccagctgctgctgagccgcctcctcctcatagagaaactggtgcatcctctgccgatagttggttggtgagatggggcccgaggccacgctgctgcggttgaactccagggccagggcagggcccttgtacttggccatcagggccgtctgctcggccgtccgctccacgccaggcaccacgtggcggttgccagtgtgccagcgctccatctcctcagggtggccgagcgccagattcctgcagggtcctgggcgacgcccctggcccagctgcagccccagcttttgtagcagcaccggccggcggccaaagtcgaagaccacccattgctcaaaggtgccgaacgaggcagcctgcacacgcactcccacctggaagtcggcagtggagctgggcacacggaagcgctcaccccgtgcgtagagccggcctggcgggaggccgggagccaccagagagaagtcggctcctggctcctgcttcagcagggccacgtgtagcaggggctcctggagaggaggccagacggtgaggggggcccagggctccccccaaccctcccgagaggcagcctggccagcgtagcccaagtgcagggttcaggtcctggccctgccacttcctggatagaacgcaagcaggccacccggcctctgccatcctcagtttcttcctgtgctacatgggggtggctgaaccctcctggggcccctgtggatgtcccgtggggcagtgtgggcagcttgaggcctcaccacccactctccaggtgccagaccctggtgaatccttgtttttgttttggtttttgagacggagtttcactcttgtcgccaggctggagtgcaatggcgcgatctcaactcactacaacctccgcctcctgggttcaagtgattttcctgcctcagcctcccgagtagatgggatcacaggcacccaccaccatgcctggctaatttttttttttttttttttttttcagtagagacggagtttcaccctattggccaggctgatctcgaactcccgacctcaggtgatccacctgcctcggtctcccaaagtgctgggattacaggcgtgaaccaccgcacctggccaaatccttgttttaacccatatactccatagaataaccctgccaaggtgggactgtcctggccccctgtctctaggtgaggagactgaggcagagaggctaagggacctgctgcaggtcacgcaggtgctgagcggcagtgcctcggtattagctccatgacccaggctgttgacgtctgcccgggctgaagtcaccacttccccagggctccctccgcccagtcggagctgttctccgctcacctcagagtggacggcaaacgtccagctgtactgggtcttcctctcctgggcctggtacatcaggggctggttgcaggtgacacgcactccatcaagggtctctgccagctgcgtggaagtctagccttcagcaagaggcctggaccccaccccaccccacccactcccagggcccacttaccacaaggacctcactgctgctgcgctggtactcggccagcagccgctcctggtagggcaccagcccgtcctgccaggccgcctgcccccgcagctccacagcctgcgtgcgccggacccactcctgcagctcctgtgctgagtgtgccttggtgcaggcgtccccatactcacagaggtcaggcctgggggacagggaggtcagcagggctacacagaggcacagccgccgtgctgagttcaaaggccgggacccctcagcccaatactggcctctgtagggagcaggggctttattcgtcccacccactcctgtgctcccgggacaaggcctggctcaagcagttcccaaacatgaacctcccttatccgggtcctcagaggccacatggctttagccctcagcaggtggcagggaggcccccgtccactgaacctgggagcctctggctctgcctacggtgggctcctgccccgctccaagctcctgggaacctctggctctgcctacggtgggctcctgccccgctccaagctcctgggagcctctggctctgcctgtggtgggctcctgccccgctccaagctcctgggaacctctggctctgcctgtggtgggctcctgccccgctccaagctcctgggagcctctggctctgcctgtggtgggctcctgccccgctccaagctcctgggaacctctggctctgcctacggtgggctcctgccccgctccaagctcctgggaacctctggctctgcctacggtgggctcctgccctgctccaagctcctgggagcctctggctctgcctgtggtgggctcctgccctgctccaagctcctgggaacctctggctctgcctacggtgggctcctgccctgctccaagctcctgggagcctctggctctgcctgtggtgggctcctgccccgctccaagctcctgggagtctctggctctgcctacagtgggctcctgccccgctccaagctcctgggaacctctggctctgcctacggtgggctcctgccccgctccaagctcctgggagcctctggctctgcctgtggtgggctcctgccccgctccaagctcctgggagcctctggctctgcctacggtgggctcctgccccactccaagctcctgggaacctctggctctgcctacggtgggctcctgccctgctccaagctcctgggagcctctggctctgcctgtggtgggctcctgcgctactccaagctcctgggagcctctggctctgcctacggtgggctcctgccctactccaagctcctgggagcctctggctctgcctgtggtgggctcctgccccactccaagctcctgggaacctctggttctgcctatggtgggctcctgccctactccaagctcctgcctcgagtatccttactttgggcagagctcgaacttggagagtcccgggggtggggaacggtgctcccagggcagggcctggtcgaaggccaccatctgtgcgtgctccgaggatgcgcagtggttctcgaaggcctcctgagagtggcaggtgaccaagcaggccgggcagtacagctgggccccagggggctggccaaggggggccgtgcgcccgtcgccatcaggggcagggggtgtgagcaggtccccccgctggaggccacccagctgctcggcctcccacacagccatctccacggcgctgtgtgcaaactggcagcgggactccccacgccagcacggctgcccacgccccacaaacctgcagtaggcaggaggctggccggcccggggccgcggcctcaccaccacaaactgttgcttgcggcggccctcggcgctcacgtgggccaggagggaggggcaggctccgtgctcagggcactgcccctgggggtccacgcgacagatgcatgggggacagcgcctgaagcagagggagcaaagcagctcgaagcggccgccaaactccgtaaggatggcgtcggccgcccggcctgcccctccctgggccccgctgccctgcacctccgccttcagccataggcgctggaggttgtgctgacgctcgaaggtccagaccagggcctcctcgcgactgcgggcaaaggtgcaccggtttcggtggcgccggcagccgagcccagggctgtagtagtggcagacttggtagcacaggggccttgggaaggtgggccggcagcccaccacgcgccagaccttgctcttggtggcctgcttaaagcgggccagcaggatctcgcgggagcagtcatgctccaccctacggaggacgtaggtgctttcattgagccgctgggtgcagcgggagcagcccagacacaggtccaccagggcacacagccgggccagggacggccctctggtggccgcggggctgttgggcagcagggtggaccctggaggcgccacctcgaacaccagcttggctctccagggaggcgtctgaggctcctgagctcacgggtccacgcagtccactggaactgttggccacggttcgaagcctgcgacagaaggagcaggtgagactgaggccagaggacatctggtccaggcccagctcagaagcacggcctctccaccaggcaaggagctggggatctgcctatcctgatgcccaagcagaggcctctccaccaagcaaggagttgggactctccccaccctgacgcccaagtggaggccttggcagtagctgtgtcctgtcagggagtacagggctcactgacccggacacagccagaccctccctcctgaagggtctcaggccccacctagaaggagccaaggtgactgcttgtggagccctggagggggcagagcccttggcacagtgccgcccccaggaggccgcacccctctgccccagccaggggtcctgtgcaccccagggcctcaggctcctgactcttctaaggacacagcacctccttttctattgaatgaccactggcccccaggaaaagaggactccacatctgcacctggggaggggcctcacggagaggagggtacagtgcccaccagagctcagggtgccaggaagagatgggtccccgggtccccaccgcagctgggatgctacaagaagagtaagtttaaaagcaacagactggaggcagacttcagtatgagaacccggcactccccgcggacccctctgagaaaacatccgagtctgccatccagaaaggacgggagccgagaccccaaaatcctgcgctccagtgggtgcagagaccacagcgctgggtcttgctgcggagggtgctggtcctggacgggctgcactgccccgggctgggtctgtggctcccgggactccgcgcccccggctgcactcaccctcccggacccccccctccgcccccggccccgccaccctgggacccccgcgctcaccctcctggagccgcccctggacccccgcgcccccgcccctccgccctgggacccccgcgctcaccctcctggagctgcctgccctgccgagcctgcccaggagctctcagtttcgattctggcccgggcactgacgctgatcgcggaaattacctcaccgccccccgccccgccccgccctgccccgcctccagcgacagctcggcccccgctgcgagggaacctcgggaagcgccagcgagcagaggacgcccctccctgaagggccagcgccgtcgaaggcggaggcggctgggggtgggggtcctttcccgcacccctccagggccccacgccccgtccagcccttcacacaccagagacgccccgatgatgtgccaggcggaaggggtgagaccctgcccggccctggacggcaggatggtctggtgactccaccatcagcccctggagaaatccaggcacagctgacctggaagcctgggtcccctgacaggcaggacctgcccgtggccctggtgctgctgggaccccaagtcccttctgtcaccaaccaggatatggcaggaatggctaagtggccgccgggtcccagagtcagcacgcctggctcttggctctctggactggctctgggccctcagcagccctgtggggaggccccatagaggagctgaggcctccagcccacttgcagctcgagtcccagccccagccttactgccatctcagggagaccccaggcctaaccctcccacctagaccacgcccagctgttagatgtctatgtttaaaataaacgtcccattagccaggggtgggggcgggcgcctgtagtcccagttactcgggaggctgaggcagaagcattgcttgaaccaaggaagtggaggttgcagtgcgccaagattgcgccactgcactccagcctgggcaacagagcaagactccatctcaaaacaaataaataaataaaataaacatctgtgttgttttaagcccctgagctttggggcgatctgttctgcagcagtagataacggacagtgatgctgcccctgaaacaaggaagcaaggctgccacccaaggccagcacctcgtggggagggccaggctgggggctcacagcgacctcgggaggtcggctgggtgggccgtcaaccaccagggagcctctccgcagaccaatcacgttggagctcctgggagagggcaggccctcgacaatagcagccccaggggccgggcgctgagcagggtccatgtgcgtggaacgctgggagaatttgtgtggaacgctgtgttcctggatggagaggctcaacaccacacaaagacgtgagttcctcctaaactaacctgcagtcgcatggtggacacactgactttcaagtccatttggaaaagcatcacatcaccaagaaaggctggacagggctttttttttttttgagactgagtctccttccattgccccggcgggagtgcagtgatgcaatcacagttcactgcagcctcgacctctggctcagacagtcttcccccctcagcctcctgagtcgctgggactacaggcacacaccaccacagtacaggtgcacaccaccacagttaactattttggagttttttctatgtttttcagagatggggtttctcaatgttgcccaggctgctcttgaactcctgggctcaagcaaaccccccacctcggcctccttgagtgccgggattagattacaggcttgaatcccaacacccagcccaggatgatgactaaaaaggattcccagcgggtgctggcatgacttactaaacacataacacactgcaaagccactgaacccggtgtggacacacagttccaaggcagaacagagagtccagaaatagagtcacactcaggagtctggggtgggatgaaagattggctctcggccaggcgcactggctcacgcctgtaatcccagcactttgggaggccaaggtgggcagatcacctgaggtcaggagttcgagaccagcctggccaacatagtgaaaccccatctcttctaaaaatacaaaaaaaaaaaaaaaaaatagctgggcgtggtggcaggtgcctgtagtcccagctactcaggaggctgaggcaggagaatcccttgaacctggggtcggggggggcgaggcggaggttgcagtaagctgagatcacaccattgcactccagcctgggagacggaacgagactctgtctcaaaaaaaaaaaaaaagaaagaaaagaaaagaaaagaaagcttggctctcacacctcagggaaaaacaattcattgatgcattccacaaattattagaacaactgattagcagcatctggaaacaaaaatgggagggacggtctctgcgtagcatcttacaccatatgaaataatcaaacactctcacggaaggaaaagccaaccacagaggcactaggagaaaccagggctgaaagtgtctgattctcaggactcttgggatgtgaaaggcctttctaggtgaaatccagccctgcgccactcgcccccagccaggctcaaggacagggctggtggcttcacacatgccgtgaggggcaagcatacaccccagaaatccacaaaacctgtctcctgaagcactgtttttttcttcttagagaacgaattaaacatctaccagcacaacagtgataaattcaatgacacaaaacaatttcacatggaaaaaaacaccaccatcaaaggagtcaaaaaccaaacatgaacagaaaacaaaattgcagcttatgtcacagtgaaaagtctgatcgctctgatatatatttttttttcttgagacggagtctcactcttgtcacccaggctggagtgcagtggcacaatctcggcaagctccacctcccgggttcacgccattctcctgcctcagtctcccaagtagctgggactacaggcgcccaccaccacgcctggctaattttttgcatttttagtagagacggggtttcaccgtgttagctaggatggtctcgatctcctgacctcgtgatccacccacctcggcctcccaaagtgctgagattacaggcgtgagccaccgcgcctggccctgatctctctaatattttaaagatcttataaattaagaaaaagatgtataatttaaaagaaaaataggcaaaggatgcaaatcaatacttcacaaaacgtggaaagtgaaattgctgtaaatggagtgaagtgttcaacctcggcgtaagggaaacgcaaaccagccccagacaacccgtccacccctctgacattgcaggcactcggccagagtctaaactggcagcaccgctctggaaaccagccaggcccgggagcacaggacacgcgccttccacgtggctccacagaggctcctgcacagagggacatctgtgcccaccaacagctcccggcagctccttctacacccaatggaccgggaatgcccagggcccctcgctcagggtctatgtaatgggcagtctccaccctgtgccatggaagactctaaggccattaaaaatgaggttggccaggcacggtggctcacacctgtgatcccagcaatttggtaggctgaggcgggaggatcacttgagcccaggagttcaagacctcagtaagctgtgatggtgccagtgcactccagcctgggagacagatcaggactgtgcggccaggacaggagggagatgtcctgtttccgcccacctttcacatctgtgcacgtcttcttaactcaaaacaaaaacaaaaagtgccacctcgagtccacagagcattgaaaacctgcaggttgccgtggacagctctctggctcccgtccagctgtgctcaggccacagtgacccctaacacgggctgagtgtgagaccacgggagagagttccacgtacacacagcacacggccaacacgctcacacgggctgagtgtgacaccacgggacagagttccacgtacacacagcacacggccaacaacacgctcacacgggctgagtgtgagaccacgggacagagttccacgtacacacagcacacggccaacaacacgctcacacgggctgagtgtgagaccacgggagagagttccacgtacacacagcacacggccaacaacacgctcacacgggctgagtattagtaatattattgtatccacgtcagcttcctgactttgtaacagacagcttccacgttctgaggaaacacaccttgaagtgatggggtaaagggtgaagggtgaagggtgaaggggtatcgtatctgaaaggtgaaggggtatcgtgtcttagtctcaattgcctggaactacaggcttctacagaaccggcaaatgggccagaacaaagcgactggtgagtccgcatagagcacagggagtcctttgttctatttttgcaacatttgtgtacgtttgtttaaattattatatcaaaatacaaagtaagaaatgtctgcccaacaccctcagcttgtctcatcccggtccctaggtcctcctcacccagcgtccctgccagtgggttccatggccccccagtgccagcctgccgtctgctgccctctgccgtctgccatcacctgaaccctgcaggaaaacgtacacactgtccccagcgtcacgaagcaggtggaggtccccagggcttagggccaggcctcagtttacctgtgactgtgggccatgtgctctcgggcaggaactgacggcctctgggtataactcgcttaagcaggtctttaacacccggttcccatctttccagagaccctcccgggcgccctcccaccagccaaaagctcacacccctagtggaggaggtgatagggtctgcagtgggagggagtggagccgatttcagatctcctcctcttggccttgtgggagccgtgcagccgggaggcctccttcgagatgagcccctggggagaaagtcagggggaccacaccttctccttgcaggggtgccagaaggatctgatgggggtttagtcccaggatgggtctacgccccccggggcctcccagctgctctgtcctctctccctgcctggcctctgcacacacagccatgtgcgtgtgacattgtgaaatatacattaacatatttggtctcgtcccgtttcctggcaaaaacccctaaaatccctggagtagccaaagtggcaagtgcctttttgtgctgatattgaccgaaggctggcagcctggaggcagcctcaggatggggctggtcctcagaaaggcctcagcaggagtagagggtggtacttgcagccttgccccaacctccaggcaggggaggggagaggcggctgaaggcggtcctcaccagtggccagtgacgtaatcaatcatgcctgggtaatgaagcctccatgaagtcgcaaaaggacagggctcagagagccgtggaggttcctggacggggtgcccttgtggggtgaaagctctgcgcccctccccttacgcatctcttcatctgcgtcctttgtaacgtcctttataataaatgggtaaacatgtttccctgagttctgtgagctgctctaggaaattaatctgacccaaatatgggggttaggaacctcaatttatagccaattggtctgaagcacccggggcttgagattggcatggggagtgggcagcagccttgtgtggacatctccaggtagatgaggatgtctaaggacagatggcgtctccagctagatggtgtctccaggtagacaacaacgtctatgaattgacggtgtctccaggttaacaacaatgtctccaggttaacaacaatgtctccaggtagacaacaatgtctatgaattgatggtgtctccaggttgacaacaatgtctatgaattgatggtgtctccaggttgacaacagtgtctccaggtagacaacaatgtctccaggttaacaacaatgtctatgaaaagacggtgtctccaggtagacaacaatgtctatgaattgatggtgtctccaggttgacaacaatgtttccaggttaacaacaatgtctatgaatagacggtgtctccaggttgacaacaatgcctatgaatagatggtgtctccaggttaacaataatgtctccaggtagacaacaacgtctatgaattgatggtgtctccaggttgacaacaatgtctccaggttaacaacaatgtctataaattgatggtgtctccaggttgacaacaatgtctatgaattgatggtgtctccaggttaacaataatgtctccaggttgacaacaatgtctatgaattgatggtgtctccaggttgacaacaatgtctccaggtagatgatggtgtctatgggtggacaatgtctccaggttgatctggaatccctcccactgcagaccctatcacctcctccactcaaggtgtgagcttttggctggtgggagggcgcccgggagggtctctggaaagatgggaactgggtgttaaagacctgcttaagtgagttatacccagaggccgtcagttcctgcccgagagcacatggcccacagtcacaggtaaactgaggcctggccctaagccctggggacctccacctgcactgtgatgctggggagggtgtgtgggttttcccgcagggttcgggtgatagcggacggcacagggcagcagacaatggctccaagtagacgtctctaggtagatggtgtcttcaggtagatggtatcggaattaaactggagcacgcccagccggcgtcggctgcaaaactgactaatctgttgttggaacagaacccccacctggtgtcagcagtgagctgtgctgtgagagtgcaggagaaacagcctagttttctgacatcattagaggtgatgagccaccttctcagcccctgctcacctctcccccacactgaagcctgctggagccctcaggccaggccctgagcaggaggcatggggtaggtgttgcaggatctaaaaggcctcccaggggcaacagagagcctggccaggggctgtgcctttctctgcttgcccccacagcacccccaaagcttgaggcttgatcagatatccctgaggtctcctggcagggaccttcctagtcctcactggcccccagtgtccctctgccatgtggccgcctctccgggatgacagggggaggggccacactcctgctggggctggagatgttggggtctggagtgggtgtgggcctgccctggggctgctctgggcatctggttgacacagagccaggtgcctgtgcgccccgtggggcagctgtgcccagcctggctgccctggaggagggagccaaaacctgggcctttccacccagccttccggtctcccctcttctccctggacatacaggaatgtggcttgctcctgacgcccagaagttcaagtccagaacgttactgcagatgtcgggagagacaagacaggacagaagggagcctgggtcagacccaggtctgcggtctgttggtccccgaagggcctgaggcggggaaaggacagtcttcaacaagtggcagctggaacacggagtaaagtttcgggaaaaacgaagctcagccccacctcgcattgcacacaaaatttaattcaagatggaacatctaagcatcaaagctaaactgtaacgcttctagaagaaaacaggagaaatcttcacaaccttgggataggcatatatttttttcttttcttttcttttttttttttttgagacagtcttgctctgtcgcccaggctggagtgcagtggcgtgattttggctcactgcaagctctgcctcccgggttgatgccattctcctgcctcagcctcccgagtagctgggactacaggcgcccaccaccacgcccagctgattttttgtatttttagtagagacggggtttcaccatgttagccaggatggtcttggtctcctgaccctgacctcgtgatccacccgcctaggcctcccaaagtgctgggactacaggcgtgagctaccgcacccagccggcatatatttctttaaaaagacataaaaggtagaaatataagagaaaaaaattgataaacaaggttatataagtaaaaaatgtctgtaccagtgagaaaaatgaaaagtcaagctattagttgagacaaaaatattcaaaatacacatatctgatgaactatatgcaaactgaaaatgtttttatctttgttattattattatgctttgagacggtcttgctctattgcccaggctggagcgcagaggtgtgatcacagctcactgcagccttgaactccgggctcagacaatcctccgacctcagcgtcccaagtagctgggactccaggcatgcaccaacaccctcagctaattttaaaattttttgtagagatggggtctcactatgttgcccaggctgatcttgaactcctggcctcaagtgatcctcctgcctcggcctcccaaagtgttgggactacaggggtgagccaccactcctagaaggcagattttttttaatctcaaaactcaaaagtccagtttttaaaaacaaacaaaatatttgaacagacactccacacaagaacatatacaaatgaccaaaagcacgtgagaaggtgcttaccatccagtcactgggacacgcaaatgggacccagcgagaaaccacctcacacgggcagaccgactgcgtccagagtgaggacggctcgtgccgcggagggtgcggagcagccaccgctcccgttggtgctggtggggatacaagacggcacagccaccttggaaaacagctcggtcatttccgatacagttaaatgaacatctgtctcaggatccagcagttcgactcctgcaaatctacccaagagaaatgaaaaaaggatcttcattcttcacaacgcctgggccagggagcccctcctgctggggccagcgtgctgacgcccacacagagacacccgccggttcacagcagccccattcccagcagccccagactgaaaacagctccaatgcgtatcaccaggcggctgaataaacaaaccgtggaacgtctgtacgacacaacactactcagacaaaaccaaaaccgaacacgtccgacccacacagaagcatggaggaatctcagaaacagttcagtgaaagaggccaaacacagacgagtattaaatgtgcggttccgtttctatgaagctcaggaacagacgaattctaaaaaccaggtcagtgactgtgaggacaggcccgactagagaagggaacaaggggagtgtcctctgcctggtgcaggcagcaggtacatgtgtctgtattgcttaaaactcatccaaggctgggcgcagtggcctgtcatcccagcactttgagaggctgaggtgggcggatcacttgagggcaggagttcaagaccagcctggccaacatggtgaaaccccatctctactaaaaatacaaaaattagccagacatggtggtgcgtgcctgtagtcccagctactctactcgggaggttgaggcaggagaattgcttgaacccaggaggcagaggttgcagtgagctgagatcgcgccactgcactccagcctggatgacagagcaagactccgtctcaaaaataaataaataaaataggccgggcacggtggctcatgcctgtaatcccagcactttgggaggccaaggcaggcagattgcctgagctcaggagttcaaggccagcctgggcaacatggcaaaaccccatctctactaaaaatacaaaaacttagccaggcatggtggctcaagcctttaatcccagctactcgggggactgaggaaggagaatcgcttgaacctgggaaacaagaggttgcactgagcagaggtcgcaccactgtactccagcctgggtgacaagagcaagactgtctcaaaaacagaaacaaacatgtctaataagggatcattatccaaaatatgaaaagaactcttaaaactcaacaataatgaacaacccgattttttaaacagacaaaagatc

SEQ ID NO: 59092 - DNA, 1266 bp, Homo Sapiens
cagtttcatttcactcattaagctcagcacactgctgcccattcccagggtggacagcccatgcagaggctttgctaggtgaaaaagcttggtttgctaaaagtcacaggcagaatcctgcaggtccatgcccttagatgtgccaaattgtaagttgcatagattttaggggtttggggcaaaaaggaaacttatgtttaagtgctctagggaaggaggcattgtttccaggtggtttcattgtcatatgatctccaggttcagaaggcaggtagtgtctggagaaacgattcctggccctgagaagttgaccattaatttctgacagatagtttaagtgcctcctgtgacatacaaaagagacacacactgtccttgtgaaattcatgagctgcaggaggagacactaatcagatcatcccagaaacgtggaaggagggccagggatggagccaaggagctaaggagggctttcctgaggaggtggcattggacccgaggcctgagttgtgattaggattacagaaaggggatcaggcaggggagcctctggaaagaaggacccaaatgtgggaagagagtatggcctgatgaactagaagcgggcagaagagaacgaggggaaagagggtggtataaaattaggtccttgggaacacagtagggttgttggtgtttatctcaaggaaaatggaaacaacagtgaaggactcttggcaaggaagggacttggtcccacatgcctgagcgtagctttcgctgttctgtggagaaagtcaggaaaggggatttgcgaggtgtttagctttccacagggcaggggtatggacagcagaggatggcactgctcaccgcttccccaactcctgcaggatcagcgacatccgactcttcatcgtggatgcccggccagccatggctgccaccagctttatcctcatgactactttcccgaacaaagagctggctgatgagagccagaccctgaaggaagccaacctgctcaatgctgtcatcgtgcagcggttaacataaccgcccagccagctgcctggcctccctcctgtgtttcccatggccagtggccatgccccatggggatcgcccctcctgcccccttgtgcatacccagcagtccagtgcaacgtctcctccatagctctgggttcttagatcttggttggacgtttgttttctccttagttgcatttcctgggtttttgtgatgatcaatggactttaatgaaaaaaaaaataaaaacaacc

SEQ ID NO: 59093 - DNA, 2538 bp, Homo Sapiens
gcactgtggctactggtatgttcatcattgatttaacaacttcaaccttcatcccagttgatatccattttacaaatgagaaagcaggctcaatgctatcactgaagtttccaaactactaatagagtaaatgggacctgagtatgtgtgggactcaggatgctctggttcccctcctccaccctggacacagctgtttcctctggttccttagctgggggctgtacggagcattccagcgagcaagcaggagctgagggctgaaggaagatgatgaggagtggaaaaataaagacagctaaaccttcaagatcgtattgacaagggcgtgtgtgtttgtgagaatgtgggtgtgatcattcttgttcgttgattgccatcccctcctttcctttcatagatctggacatctgtcccttacttagcatcctacgtcagtcccgtgttaaaagaaaacaaggcgattccgcatccccccttccctggaggtcctgtggaatggtaagtaatcagcacaaagggggttaatcttaggcctgaggtttggggccgggtgacaaggaagttaaactcgtcctccctgccagattctaccccctttcggagctgagctccagccaaacctgtggagttttctttgaccattttaggacatgttactgcttctgagttggctcccccagctgcttaaacaagacctttctcctgggttcctagtagtgaaaaggagcagcagagcaactgaggaggagggcgggtgggaggcatgggactggggcttggggaggtcaggcgagaccggggtgagagctcagagaagctcctgtgacttccatgctaagatcttgccagagaactctggtcagtccttgggtgtctggatgaagtaaaggagttaggcatttcttcctttgattctctggcttacctaatagagagagtcagatgtggtctgctggggatggacagagggtttgtagaagtctcctaggctttagtgacccatcctctgcctccgcctccatggtggccagcatgaaccaggattgtctgaaggggttgtatcctctaggccagcgacctggttttatgttgagcgaagaggcggacgccctccctagaggagagtgcagctggatcaggatgcttgtgcagaggatgccctgtctgcacatttaccagcgttttccctacccccagctccttgggggattctttttcctggagtcattcactactttttgcaaaggaagtatgctatgcttagtgcccaaaaccaaaactgtcttcactttttctgtcctcctagaaagtgatcaattgagagccatggcaggagaaggaatggccagagaaggttactcagaagggaggatgaggggtggcttccctcaggtgaaggtttcacagagaagaattgagttttctcctcctaaccacatccagcacttgcccaatttccctcaatgtggaatgaaacccctgggccagtcactgcatttcccataaaaggaatgttatcttggaaagggcataaagcgtcagccaagtcagagaagttcagaaacatttccaggaatgcagttcatttggaagcccctggctttgcacttgcgtgtcttagagatagtgtgccttcaactttaccttctatccagggctatttcctgttgcatctgtcaaatgagggcagtgacttaaaagagtaatatggtcttcccagcttcgtcatcctctgcttcctgctgaccaggggacgttgccacggaatgtctaccctaggcattgaggcatctggcaactgcttgcttgtcactaaaaagtaagagaaagaaggacagattgcctgggtggagaagagtgggaggtggcctagtggagaaagcaggattaagagaagggagggaaagatttagggagtttggctaatggagccctttacctgttggaagggcagcaagcaaaagttttaccagagttttccctacccccagctccttgggggattttttgttttgtttcatttttgtttttgtttttttgccttgagtaattttgacatgcagagttattcacaactttttgcaaagtactattttcattggcttttcagagccagtgaagttgccttctcctccaacatgaccacattttcctctgagcagacaaaaacagaacaaataagtttgtgggcttgcttggaggttgaaagaaataagtccagttaaaatgagagttgagccaggtgccctggctcatgcctgtaatcccagcactttgggaactttgggaggcagataacctgaggtcaggagtttgagaccaacctgaccaacatggtgataccccatctccactaaaaatacaaaattagctgggtgtggtggctcatgcctgtagtcccagctacttgggaggctgaggcaggagaacccgggaggcagaggttgcagtgagctgagatcgcaccattgcactccagcctgggcaagaagagggaaactccttttcgtaaaaaaaaaaaaaaaaaaaaaaaaa

SEQ ID NO: 59094 - DNA, 1958 bp, Homo Sapiens
ggagcaatatccttcttttaaatggatttcttattgttccaaagatgtggcatttccaaaagaaaattcttccatttatgcatagaaccttgaactctagtctttaaaaatctaggctttagtttcagctcttttttagctgtgtggtcctggacaggcccttttacatctagacttggagatttaaagaaaatcataaagaattaaatgagatgatttctaagactcatttcattttaaaactctgatctttcagagacgcacaaatccattccctcttgctgtggaggagaaaatacatgaaaatctgaatccatatgcatttgtcagggttctccagagacataaaaccaataggatgtatgtgtttatatagagagatttgtaataaggaactgactcacccagtcatggaattccataatctgcatcatcaagtgtcatggtctgtagctgggaagctggagacccaggagagtccatggtgcagctccagccttggcctctgacagtgctgggattataggtgtaagccaccacacccagccctgagtgacattatttcatacaaaattctcatctctggaggcctttgtatttttaggggttttgtttttcaaatgctttttacctctttctatacttgttcatttttaaatgtttcctggcagagcaattagtattttctggcttactaggtgctattcgattgcattagcgtttgaatattacccagctagttgtggagtggggcagtaagctcataaagaagcaagataatggaatacacaaatattactacgactttatgggtggcataccttgattcttgatccacgtggctgtgttcagatctggttagcacacattgacatcaggggctgagccaccagtgagagtcaaacccagcagccctgtcagtctaccttctctcttgacttgatccagcctcataacttcactttccgcaggagaaacacacctcttgaggtcctctgtcacaaataggcagtgtttctggagaaagccaggaggcagattttagtgctgttcagcatctgtggtctctactttctggatctggtgcattatggagaccatgaaatgacatgaaatagctcagtgctgccagtggcggtgacagggacactagaggtgaaggagggcccttggggcaattccagcaggtgggtggtggctgaaggtccttgtcttctttctgcagagactggccacctgcttcattctttcaagaagcaccaaatccctacttcagtactttgcccactcgtcatgtcaggagcatgaaactcacgaggccttcatttacttttatcctgtaacaccttcaatttttcccacatcctcccttgattcgtggatggacaactatggaggccaatctggctgaggtgaagactgcttgagtctaaattcctctctcctcaaacccaattcaaactggcctgagcaaaatgaatgtattgatccataactgaaaagtccagaatgatcaggcatcaggcatggttgcatccaggggcccatgtattagaaccatctccttccagttctgggctctgcttgcctcccagttggttttactgcacagaggcttattcaagtccagagagatcttatctttccctacaagtctgtgaccttgattctgaacctgcatctatgggaagggcttgcagtgtctgagtgagcttggactgtgtaaactttcccacttctgaagctgggggtggggttcactccactaagctacatggctctagagtcagggggttgccccctaagtaactggcagtattgttaccagaaaaatcatgaatggacactgagcagaaaactcagcagatgtttatttcctggtctttaggatttgttgaagagttttttatttgtttgttttttaagaaagactcaaaaggaaaaaaaaaaaaaaaaaa

SEQ ID NO: 59095 - DNA, 1296 bp, Homo Sapiens
gccaagattccctcagtccagtacctccttgctcctttccagtcttctgtcctgggaggctgagatttatgggtcttccttgccctccactaccaatttctatttccttgactatgcccctctctacaaggtctttttggtttcactgcctacatagctttaggtatactacctttccgcattgttggagcatgaggcagttgggccaaaatggcattaaagcctaaagtgaggcatgttcaagatgccacagtgaccaaattcacgccatccaggatgcacctgactctggaagctgatgaggctaatgatgctaacgtgtatcctggatccctgaggtccgctcccaacatcagcccttcagcctcagctgggttctaacaaaaccccctgccacctccacgttgatctttgttgtcattctcatcgcagtgctttggtatgggaggtgttagaaaacttagagactagaattgtggaggttgggaccttgtaactccaataagcactgaagaaggtgtctctacagtcccttcttccatggagctggaacccccgcacccaccccaagtgtaaaccctctcctcctgcaggttcaagctcctcagtcccagggaactaaaactgaataatgtgaggaagcagtgatgtttctgctcaaactgtgatctggatccagaaactagccctaaacagctcatggcttctcaggaagctttataaaaggactgtctcactcacattctgcctactttcccatcttccctcctgggaaaatgaagtccagttaatggaatcagcacctttccttcattcctggtagattaacccttggcattaagcagatagatatttctaagattattctaccagattcatgaaggctaaagggaattccttttgattttgtccttgttacttaggggtcagggataaggatggtagagttgattgaggccctagatcaggaccattgtcagaaaatgaatggcatggccgggcgcggtggctcacaccttaatcccagcactttgggaggctgaggaaggcaaatcacaaggtcaggagttcgagaccagcctggccagcatggtgaaactctgtctctactaaaaataaaaaaattagctgggcatggtggcaggtacgtgtagtccctgctactcaggaggctgaggcaggagaatggcttgaacccagcagatggaggttgcagtgagccaagatcgtgccattgcactccagcctgggtgacagagcgagactctgtctcaaaaaaaaaaaaaaaaaaaaaaa

SEQ ID NO: 59096 - DNA, 553 bp, Homo Sapiens
  misc_feature (24)..(24): n is a, c, g, or t
  misc_feature (75)..(75): n is a, c, g, or t
  misc_feature (404)..(404): n is a, c, g, or t
  misc_feature (459)..(459): n is a, c, g, or t
  misc_feature (513)..(513): n is a, c, g, or t
  misc_feature (540)..(540): n is a, c, g, or t
ccccatttaaaaatatcttacagnggcataactttccctgtacaaattgggtttaagaaacaaaagggacaattngctaatcaatgatgagcctttaatccaaccattatatatcccctttccatccttagatcccttgaagagaccatttagttaagactaccaacaggtgacaccctgacctccttaccaaccttgccttttagaggtgaccagagacctgtgcttttccaaagtactgttatacgtgtaattagtataatatcaatgtggggaaactctacctttggattttgaggactctgcttttcttgaaaccctctgggttagagactgtttattcatatgcacctcaggaacttgaggccaagatgaagttcactgtttcctagtcctttgcttgntctcctggccattatgtttccaccttcattcaaaagccttctctttggaagctgnttataacccagcaacaccatcaactcactgggctactggcctcaatcccatttncaagcactttcccttttcatgcaaatnatccaaaaccaac

SEQ ID NO: 59097 - DNA, 563 bp, Homo Sapiens
  misc_feature (465)..(465): n is a, c, g, or t
  misc_feature (491)..(491): n is a, c, g, or t
  misc_feature (511)..(511): n is a, c, g, or t
  misc_feature (515)..(515): n is a, c, g, or t
  misc_feature (523)..(523): n is a, c, g, or t
  misc_feature (530)..(530): n is a, c, g, or t
  misc_feature (556)..(556): n is a, c, g, or t
aggcaaaactattttcattttactatgattggcaaattatgatgtatttgattgataaatctcagatttatcagattgattctagttcgtcttcatgtggcagaatatgtgttgtcaggagtgatttggtaattcagaaaagcagctgaagaagcatggaaacttccctacaagtatatggccacagctggctaaggttggagacagtattctatccttgggcctcagactcacatatgtatgtacatacacatattattcacccatatttccttccttctcccctcccccatctgtaaactgatatctaaactttacaaattacagttacaagaaaagttttgttccatttgaaatacaaaaaagatcaggagaagcaatctgctttttaattttacttatgcaggtaagttttttaaggatacagtcaatttggtttggcactttggaactaagaggggatcnggtcataaaaaaatctaccaactctnagcgaaactgaaatgaggtngacngaaagggntcccatncataaagggtttaaaaattaccaagnccaattt

SEQ ID NO: 59098 - DNA, 457 bp, Homo Sapiens; identical to SEQ ID NO: 36115

SEQ ID NO: 59099 - DNA, 1998 bp, Homo Sapiens
aaagtatacaattttgagtaataagaacagaaatcaaagtaactattgtatgctgtattttagtagagcaacactgaagaagaaagaaaacaagaaataatattaaatatgaacatatggagaacagaataatatttttaaaatttttagtttctaagcttatctgaaattttaattttcttttcttatgtaataccagagttattaggaaggtattatctaataacactattttcagtgatattttaagtagttgtcctagaaaaatttctattttttaaaaatgtatatttaaaaatacattaaatgtgtatatacatcaatcatatgtatcgatttctgtttttcttgaattgcaaatgaaatttgtatttttgtgttcctggaataaaataaactcgaatgggtcgtaatatattattcatgctgtaattcaacgtatttgaatactttaagaatgttacatttatagttaacagatactgacctataaattttctgtcatataatgatgctgtgagacaatctgagaagaattaaaatttaaattcatgtattcctacttttttctctattctctaactgtaaaatattttcattacagatggaggaacaaatagatgttagataaatagatatataatagatcatccaaaattcttattcttatggttttatgtagtcagtatttacctctatttttctacatgtttatccttccaatttagttcattacttcctgcacctttgatgtcatatacataaacaggaaataacacatggtggctgggatgtagagagagccacaggacttgtgaatgaaatccacaggcaaggatgtggcgattccttttgcaatattggagggaatgccaaaccctatgtttgctgtggaaaagagtatggtagttcctcaaaacatcaaaatggtattgccttatgattcagcagacccacatcccaagacagcaaaagaattgaaagcagagtcttgaaaaaatatttgcacatccatgtttgcagcagcattattggcaatagctaaaacgtagaagcaattgaactgtccaacaacagatgaatggatgagcaaaacatgatatatacatacaatggaaaattattcagccttaaacgagggaaatattctgacatatgttgcaacttggatgaaacttgaggatattatgccaagtgaaataagttagtcagtgaaggacaaatacagtataattccatatgtataagggacttgaagtggacagaatcatagagatagtacaatgatggttgccagaagctggggggaggaagaaatggggaagtattgtttaatgggtatagtttcagttttacaagatgaaacgaattatggagatggatggtagggatggctgcacaatgttatgactatatttagtaccactgaactgtacacttaaaatgtttaacagagtacattttatgttttatgtatcttaccacaataaaaaaataaaataccttaggaacattttcctgaaagagtccacataaaattcattttaatgcatgtgtttatgcatagctttctatttttctcttttctctttacattccaaattagaatataatgctaatcaagtatagtggctgcgtttctttcttcctctagtctgcaggtagcatacaaatgtaataaagtactcattcatgtcacatctatttattttctgccttataccaagcttgtgggattctcttaaatacaacatttttatacttacacctatgcaatacccattagcatcgccttcctaaatcaggggaaattgagtctctgtaaggtgcagtaacttactaagatacaaaactcagcattaaagtctgtatacttcaatatcctgccctcttctcatttgtctttactgccttttatgtatgtgttagatgttcaataaattctcttttttaaactgaaaaaaaaaaaaaaaaaaaaaaaaaaaaaaaaaaaaaaaa

SEQ ID NO: 59100 - DNA, 566 bp, Homo Sapiens
ttggtggctcacatctgtagatgcagccactcaggaggctgaggcgggaggatcaattgagctccggaggtcgaggctgcagtgggccgtgattgcaccactgcactgtagcctgggcgacagagcaagatcctgtctccaaaaaaaaaaaaaggaaaaactattgtttttgccatcgccacccagtaaacatagttactgatatttttacttgcagtgtaactttctggccccttcccataatcacatgtatttggtaagcttttgttttcaaaataagccaataacatttaataagaaacaacagtatatttgtctgttttcatgctgctgataaagccatacccgagactgggtaatttacaaagaaaaagaagttgaatggactcacagttccatgtggctggggaggcctcccaatcatggcagaaggcgaaaggcaggtctcttcagcacacagggatcaaaggggacgaaggtgtccagtgggtttgtgcaggtctgcactgagtctcctccagtggtactcctaatgactggcagcatctggcgattggtcctctcga

SEQ ID NO: 59101 - DNA, 96217 bp, Homo Sapiens
gatccagtccctccacccaccccagcccccagggttttggtggaaatttaactaagttggaagattgataatatctccattcacatttggatatgattttaatgaaggttgctttttggtttttagggagaagaaaatggctttccagatagcactggagatcctcttccaggtaaatgattgattctaaagctatctgggctaatagctagtgtggctgaataaaagataatttgaggccagggtcggtgactcatgcctgtaattccagcactttgggaggccaaggtgggcggatcacctgaggtcaggagttcaagaccagcctggccaacatggtaaaaccccgtctctaccaaaaatacaaaaattagctggttgtggtgggcgcctgtaatcccagctactcggaggctgaggcaggagaatcgcttgaacccgggaggcggaggttgcagtgagccaagatcacaccactgcactccagcctggacaacagagcgaaactccatctcaaaaaattaaattaaataaaataaataatttgagactatgtttatcattaactttaaaatctgtactgcagaatagagcaactttctacctgcggtgcactgcagggaaagccgtatcttacaagacttcacaaaagccttcaaagagtattttctctgcactaaccttcctttgcatgtgaggggcacggcagggttctgaatggggcaggtttaggatcaggccagtcgggactgagtggattcttcttccctctgagttctaagagccatagcattggtggagaacatgctgtttgttgcttggtggaagggaccagaagccagctgggtcatctctctgtttgtgccttggccacttaggtagccaaaggagccctcctgacattaggtcaggtgttagtccctctccttttctgcttttagtgtgtttaagcaaataaacattaaagttcatttctccccgctccccttttttaatcataagacagacatgtttgcaatgtttaaatttctcattaatcagaagggatagggagtgagggagtaagcattaaaataagctagcaaatggccaggtgtggtggctcacacctgtaatcccaggactttgggaggccaaggtgggcagatcacttgaggccaggagttcaagaccagcatggccaacatggcaaaactccatctctactaaaaatacaaaaattagccaggcgtggtgatgggcacctataatctgagctactcgggaggctgaggcagagaattgcttgaacccgggaggcaaagattgcagtgagctgagactgcaccactgcattccagcctgggtgacagagcaagactccatctcaaaaaaatgctagcaaaataataataataataataataaaacatacctcaccaacattttctacatcttgtaaagcatacattgactgactgaagtcaccagagttttgtttctttctttcttaagcagggtggggaacccgtagagccctcaggggcagctatcatcagcccaggtaaccaagctgaaaaaccagaaggtgcagtgcgtactcaactttttccccttagaaacacgatattagaaaatacaccaataccaacatgtgagcaacagttctctctggaaggtgcagttctgggtgatttttttttcattccatagattttttttttcttgagacggagtttcgcactcttgttgcctaggctggagtgcaatggtgcgccaccacgcccggctaatttttgtatttttagtagagacggggtttcaccatgttggccaggctggtctcgaactcctgacctcaggtgatccacctgcttcggcctcctaaagtgctgggatgacaggtgtctcactatgttgcctaagcttttctcgaacccctgagctcaagcctcctcccacctcagccatccaaagtgctgggattacaggcatgagccaccacgcctggtgagtttttattttctttccactatcctatatttctaaaatttctaacatgagctggtatcagaactgcccctccgcatttaatctgtgtatacaaatgtatatataacaaatgatcacatgttggtaagtataccttgctgcatggtgaaataaccaaggaaacttctaaaaggttaactgtggttggcctgggtaatgggagcattaattttttccatatgctcatctgaattttcagatttgctatgacaagcacatatttattttctaattttaaaaatctatatttaaactctttaaagactaacaccctacacactaatgtggcacgttagctaaaataaaaataaatacagaaatttgtttagaaatatttgtaaacccttcaaggactcttctgaatgatagtcattattaattagcaggttaattttaatcaggcttctggtcatcttcaaacattttttacttgtgtcaaaatgaaccaccagagtgtgggtttttttgttattttttttgtttttttgagacagagtttcactcttgttgcccaggctggagtgcaatggcgagatctcggctcactgcaacctctgcctcctgggttcaagcagctctcctgcctcagcctcctcctgagtagctgggattacaggcgcccaccaccacacccagctaatttttgtatttttagtagagatgggttttgccatgttggccaggttggtcttgaactcctcacctcagacgatccacccacctcagcctcccaaagtgctgggactacagatgcacaccaccacacccggttaatttttgtatttttagtaaggacgggggttccccatgttggccaggctggtctcaaactcctgacctcaagtgattcacctgccttggcctcccaaagtgctggcattacaggcctccgccaccgcacccagcccaacctgggtccttttgtatgtgagagtttgcttgtttttttcacgtgctttctctactccagttttattctatgacaaaattgaggcccaacatgatttacttgcctggatccacccaacctgtcagttacttcccagtgctgctgccaacttaatgtctccttaaaaggatgctttagagaaaacgaaatcatgttgtttttcccctttggttaagagatcaaacgcccaccaaaagcccttgggtcagtttcttagtagataaaaataattcttcgtcactttctgaaagcggctaacatataacccttatgatgaataatgtggtgtgtgtgtgtgtgcgcgccccaaattccaatgagttatcaaagccagaaacttatattttaaatatgtttatttcccaaccacactggaaaccacacacagaaaaaaaaaaaagcatgattatacccccttaataaccgttactgcagaaggatgtgactctccttcaacacttgttggtattttacagcctccaaatctgaccatgtataaccacctgggatagagttattttatttcagaaccataatacttagctatctcggaagttgccaatataaaatgtttactctctaatggttttgaactaactcaagacctggttatcccggggagcatccttacaaatgatctgagagctaacagtcctcttgcagcagtggagggaaacactcccgtggcaatcactctccaaaagccagaatgtgcaagataaaagggcaccttccctgcagggaggcacattaagtcagtctgtgatctgctgccaacatcctgactggagccgtttctacgcctaactaatcatgacgtttgtgaattgtgaagcttgttgcaattcacaattaactgttaattgacccatattttataacccgccagccatgaacttacaagttagatacagacactaccagacattcactatttttttttacaattgttttaaatgacattaatgagcatgcttgattcctgaactcttctttacagtataattttaaaatatttgagtgggatacgatggagaggagggaggtgggggaagaaatgccccatggaaaacccactcatcaggttgagagtgtggagaagccctgtgtatctgagaactcttaatcatccacagacatggtatctctcaaagagaagtgggtgtaattccaaaatctaattttggcaggcgctcctgactaaatacttaatctggagatgtcttcaaggcaggcggaggttttcagtcctggctgcacattagaagtcccaggggagctttaaaaaattcccacgtcctccctgcatcccagactaattaatcgggatctccgagggtgggaccacacatcagggttttgtaaatttccctgggggtttggtggggttgggggtggaggcgtctatcctatggccaaggttgagaaccactgctttttaaaagactgtttgcttgtttttgagatggggtctcgctctgtcacccaggctggagtgcagtggcgcaatctcagctcactgcaacctctgcctcctgggctcaagcaattctcctgaaaaaggctgttggttattaatgcttccccacagctattctattcattgttgcatgcttcttacgtgtgctaggatgggagctttaaaggattacctcatttaatcctcacaaccaccttgtgagagaggtgtcattatccctgtttggagagtgagacaggggcttagcaagctcagtaacctgtccaagtcacacatctgcatggggttagctgctgctaaagctcatgccgttaatctccatggtacacggtgtcctctccatagcaatcttgcggctgccttgttaacaccaaaaaaacttgcatcagctggtttgacaatttctagataaagagctcttttcgggctgctaagaagcctaatttttcatttgattttcttcttgaactgtgtcacactcctcattcatttgatatattcatcaaatacttattgagcacctgctgtgtgcctggtgtgcagcagtgacaccagacatccaaagtccttttcctcttagagcttattctatctgggagagacagataataaacacaaaatcagtaagtcattttatatggtggtaggtgccttgaggaagatgagccaggttaatgggattaagcctggtagggggagggtgccactttagctcggaaagggtagcgagacccaaacaatgcaaaggacccggcccgtggagatctaagacaggaggatgccagggacaggaagttgctggggcaaagcccctgaggctggactgagctcagtgttctaggacgggcgtgggcagtgaggagcagcagaggaggtgagctgggagatagcctggggactctttcttctgcctccttcaaaaaataaaactagccaggtgtggtggctcacacctgtaatcccaacaatttgggaagctgatgtaggtggattgcttgagtccaggagttcgagaccagcctgggcaacatagtgagacccctcccccatttctaccaaaaaatcaaaaaattagctgggcccggtggcgtgcgcctgtggtcccagctactcaggaggctgaggtgggagcgttgtttgaacccgggaggtggaggctgcagtgaggcgtgattgtgccactgtactctagcctgggtgacagagtgagactctgtctctaaataaataagtaaatctagaacctaacatcttggagtgcagtggcaccaccatggctcactgcagcctcaatctcctgagctaatcgagcctccccttcagcctcctgagtagctgggactataggcgtgcaccaccatacctgaataatcaaaacctaacatctttaaagaacattggcataagacttggcaaaaatggcatcttgtccctcatctcatttagtccaagcgatacaggaaatgctgccacctccattttatagatgaggagtctgacgttcctagaggttcaatgccctgaaacgtcaagccttgaggaagttggagcactgggattcgaagagcaccatccaatacagacccagaatcaggatgatttgggattatgcttgtcaaggactcagggcagggctaccatacattaggcacaagaattttgatagtgataattactgtgttcattgtcacttcatcatgacagttaccgtgatgataagaaacctggcccttcttcacctgacaaaggctttcttcgtttgagccactgctcaaacgagactgaccaagaataaatcctcggggctttggcctttaaaataggaagtcatcataaatgacttgatgtggtgtgtttcattcttgctttgcaccagtggaaaatatacaggtcaagcatcaaaacatggcaaatggggaccccaattattagagaatctaagttaatttttatgtataattaattattcaacaaccctctcctctccaaaccaataattaatccatcttttgtattttaagaccaattctgtagtattttccatcaatatctatttactgctagcagatatcagctacattctttctcctttaatagaagttccctctttaggtattaagattcattaaacaacaataacaaatctaccttgcctcccagggacaatgcacagttctcattcatttgttcatttagcagataatttttgaatttccactgtacagcagccctgtgcttgtggttggcctgttatttgagaagcatcaaataataatctcattttttggctgggtgtgatagctcacgcctgtagtcccagcactttgggaggctgaggcgggtggatcacttgaggatgggcgttggagaccagcctggctaacatggtgaaacctcgtctctattaaaaatacaaaaattagccaggtgtggtggcagacacctgtaatcccagctactcgggagggtgaggcaggagaatcgcttgaacctgggaggcagaggttgcagtgagccgagatcgccccattgcactccagcctgggcaacaagagcgagactccgtctcaaaaaacaaaacaaaacaagacaaaaaaaaacccaacaaataaaataaataatcccatttttctccatttttgagaaagatttctttggtctgaagtctttctctcccctctccgaggcattacccagtttaacctttcatgtataatatatatgatagttatttaaagtatagcaggacaaaatgtatttgataggagaaaaccttgtttgctctgtgttaagtcctccagagagctaattagagtttgtgattctaaaaggcaactatagattcacttatattagcagttcatgtagattccagttaaggaaatggtttgtcacttgtgttattgaaaacacacacagggcgagcactgtggcccatgctggtaatcccagcgttttgggaggctgaggtgggcagatcacggggtcaggagtttgagatcagcctggccaacatggtgaaaacccgtctctactataaatacaaaaaattagctggcagtagtggcaggcgcctctaatctcagctactcgggaggctgaggtaggagaatcgcttgaacccaggagtcggaggttgcagtgagtcgagatcgcaccattgcactccagcttgggcaacaagggcaagactccgtctcaaaaaaaaagaaagaaaacacacacacaaaaaaactttagtagatctttcggcatattattttttaaaataaactgataatggttgatatgattgttcaaagaaataagagcttttcataaactcagtttaaagaaactttacaggccgggcgcggtggctcatgcccgtaatcctagcactttgggaggccaaggcgggtggatcacctgaggtcaagagttcgagaccagcctggccaacatggtaaaagcctgtctctattaaaaaatacaaaaattagccaggtgtgttggctggcgcctgtaatctcagcaactcaggaggctgaagcaggagaatcgctggaacctggtaggcagaggttgcagtgagacaaaatcgtgccattgcactccagccccagctgacaacagcgagactccatctcaaataaataaataaataaataaataaataaataaataaaggagctttacagaaaccttctgatgtttttttcttcttgacgataacattgccaacactgaatcttacaaagataagacaagaaagggaccttcagacaccattacatgtaattctggacttagtggtttaaatccttatttttctatgacattaaaaaaatgtatattttaggccaggcacagggctcacacctgtaatcccagcacttcgggaggccgaggcaggtggattgcttcagcccaggagttcaagagcagcctggggaacatagtgagacccctgtccctacagattttttttttttgtttgagatggagttttgctcatgttgcctaggctggagtgcagtggcacgatctcggttcactgcaacctctgcctcctgggttcaagcaattctcctgcctcagcctcccaagtagctgggattacaggcatgtgccaccacacccggctaattttgtatttttggcagagactgggtttctccatgttggtcaggctggtcttgaactcccaacctcaggtgatctgcctccctcagcctcccaaagtactgggattacaggcgtgagccaccttgcccagcctacaaaaagttttaaaaaattaaaaaattagttgggcatggaggtgcatgccagctactcgggaggctgaggcaggaggattgcttgagcccatgaagtggaggctgcagtgagccataattgcagcactgcactccagcctgggccatagagcaagaccctgtctcaaaaatatatatagtatccaaataaacacaataattacagaaaattgaaaagtgcccataagcaaaaaaaaaaaaaagaaaaaattaatcacctgcgttctcatcacccagaattaaccattgttaatatttttgttatagatccttccaaacttttctccatgcttgtgattgtatttattatacatgatttacagggatataaacgactgtattattagtcattagaagaactggattatggccgggcacggtggctcacacctgtaatctcagtactctgggaggctgaagtgagcagatcatgaggtcaggaaatcgagaccatcctggctaacagagtgaaaccccgtctctactaaaaatacaaaaaattacctgggcgtggtggcaggcgcctgtagtcccagctactcgggaggctcaggcaggagcagagatacctatctgttctcaggattttaaggtgttgcgcggaaataagaaaaccgtacagtgtttctcactacaaagcagggtcaggagatgcaaacaaactgatgtgggggttccaagtgaggtggaattccagacaggggccgggaagacttcgtggaaagggagaatctgaggtgggttttctaggatgggtaaagttcattagaggaagagaagtgcaacagaggaagttcggtgagaggtagagggaaggcgttctgatcatgaaggaaacactagaaaaggtatggagatagaaaaagataaggcctgattttttaacctaccacttaaaaaaaatccttgaaaagagatttttaaaacgaatacttggtgctgacaaaggtgaaatgaccgggcgcggtggctcacacctgtaatctcagcacattgggaggctgaggcgggcagatcacttgagctcaggagtttgagaccagcgtggccaacatggcaaaactccatctctactaaaaatataaaaattagacgggtgtgatggtgggtgcctgtagtcccaactactcaggaggctgaggcaggagaattgcttgaacccgagaggcggaggttgctgtgagctgagattgtgccactgcactccagcctggatagcaggatgagactgtctcaaaaaaagaaagaaaaggaaagaaaaaaaaatccgtactgtaaactggtaaaggctttctttctggagagcaatttggggcacatgcaccagtagccttagaaggctcatgcttttgacctaattatcctattagtggtgagatgattaaagatgtggccccaatttatgtgaaaggtatgcatcacatcttcactcataatcaggagagttggggaaaaccctagctgttaatagtttatccaaaatccatatatatatgtgtgtgtgtgtgtgtgtgtgtgtgtatggatttatatatatatataaatggatatatatatatatctggatggatatataaatatgatatatatatgtgtgtgtgtgtatatatatatgtgtatatatgtatatatatatgatggaatactatttagccataaaaaggaatgaattaatggcattcgcagtaacctggatggacttggagaccattattattttattttatttatttatttttgagacggagtctcgctctgtcacccaggctggagtgcagtggctcgagctcagctcactgcaagctccacctcccgagttgacgccattctcctgcctcagcctcctgagtagctgggactgcaggcgcccgccatcacgcccagataactttttgtatttttagtagagactgggtttcaccgtgttagccgggatggtctccatctgctgacctcatgatccacccgcctcggcctcccaaagtgctgggattacaggcgtgagccaccgcgcccagcgagactgttattctaagtgaagtaactcaggaatggaaaaccaaacatcgtatgttctcactcataagtgggagttatgctatgaggacgcaaaggcataagaatgatacgatagactttggggactcagggaaaaggtgggaagggggtgaaggataaaagatacaaattgggtgcagtgtatactgctcgggtgatgggtgcaccaaaatctcataaatcaccactaatgaacttactcatgtaaccaaataccacctgttcctcaataaaccatggaaattaaaaaagaaaaaagaaaaagtaccctggaaaaaaaatttctccctggccagtcacggtggctcatacctgtaatcccagcaattcgagaggctgaggcaggaggatcacttgagcccagtagttcaaaaccagccagtgcaacatagtgggaccctgtctcaaataaaatctaaaaattagccaggtgtgttggtgcatgtctgtggtcccagctactcaggaggctgaggtgagagtattgcttgagcctaggaggttaaggcggcagtgagccgtgattgtgccactgccatccaacctgggcaacaaagcaagaccctgtctcaaaaaaaaagaaaaaaaaaacctctctattcgccttttaagaatacctgggcttctctgtgtacacttaagcttcattggagtctttagactttttttttgctgtatctgtccagttaccaagtcccagcttctactccatgctccccatgctctcttcctattttattttccatgactgcctcggtataacttgtgctcaaccaaactggactactcaattccctgcattttcttttttaaagtttaatcaaaaaaaaaaagaaaactggctgggcacagtggcttctgcccacaatctcggtgctttgggaaactgaggcaggaggattgcttaaggccaagagttcaagaccagcctgggtaacatagcaagacctccatctccacaaaaaaatttaaaaattgactgagtgtgatggtgtgcacctagtcccagctgcttgggaggctgaggcaggagaattgcttgagcccaggagttccaggttatgatgagctatgactgtgccaccgcactccagccagggtaacagagtgggactgtctcaaaaaacaaaacaaaatccctaatataatctcagtgtgccttttaagtatgccatatatatatatatatatatatatatatatatatatatatcacattttctttatccactcattgattttcatgtagttctaatcgtagaattcatacattctttctatcttccatctttcacataacatcacaaacattttctaggttgccatattgtcttcatagttacttaaataatattccatcaagtagcacaatcatttatttcactagtcctctaactgtagacattttggttgtttttgaaacttaataatgtaaataacaccgtgataacaatgtttatgtaaattcatattttggattatctccttagggtggattcccagaagtcacattagtaggtcaaagagtatgagcctattttcaaggctcttgttttattaccttttaatttccacttgcctcaatattgctggtttgctcccttatgatcaccagagttactccgtcggtccaaattctttaccttccgaaactgggaaggccatgactcaatgttatatatatagtaaaggctactataaccttccccagaattttccaagccagtggtctctaaagtgacctttggctgttaaaatctgaattcagagggttcatgagactcagtgttgttgtagaatttaagctccttaatttgccacgttgtttagacaccacttaatactttattgcaaatgacttgtcaacgcctctcacctacaaacttcatcctcctacaaatatacctcctgctaatcaaatgaggctacagttgagtctttaagtttcagtagaaagatggcccttcctctggggtaggcgcatgctcttcatgctgaagctcagctgaaaagcctcctgctgagttttctgcctctttccctcccactgcacacaccccagggtgttggcgccacttcaaagggagcctgtggatgaagaaaacacaggtaaaggcagagggctcataagggggccataaatttaaaaagttaagattcctggcactatcaactctcacttgttttcaaatatgcatatggagtggatattccagttttcatgtctgtgttgttgtttttaaaaaaagacctttcaaagaactgtgcattttttacaggctgacaggctgtgtttggtgttaaactgtcagggctgactggtcacttggaaagggcaagggctgaggtgcatgcaagtgtcggctggttactcacagacacagcagccccttttaccccggagagagttctgtttgctggagcccttattctggccagcagtgtcacaaatgcacactgtaagacatagacagtcttggaaagaaagggaaactggctttaaaaattcttactccttctagcaaagcaattcatctttggctataaagaataacacagccaggtgcggtggctcatgcttgtaatcccagcactttgggaggtcaaggtgggcagatcacttgagtctaggagttcaagaccagcctgggaaacatggtgaaaccccacctctaccaaaaaaaaaaaaaagaaagaaagaaaagattagccaggtttggtggtacgtgcctgtagtcccaggtactcgggaagctgaggtgggaggatcgcttgagcctggagggcggaggttgcagtgagccgagatcatgccactgcactccagcctgggcaacagagtgacaccctgtatcaaaaaaaaaaaaaaaaaagaacagtaacacattattagaaatgagcattctgaggccaggcacggtggctcatgcctataatcgcagcactttgggaggccgaggcgggtggatcacaaggtcaggagatcgagaccatcctggctaacacggtgaaaccccgtctttactaaaaacacaaaaaattagccgggtgcagtggcgggtgcctatagtcccagctactcaggaggctgaggcaggagaatggcgtgaacccctgggaggcggagcttgcagtgagccgagatagtgccactgcactccagcctgggcgaaagagcgagactccatctcaaaaaaaaaaaaaaaaagaaagaaacgagcattctgaaatagtcttccatatgatgcttttgacaattcagcaggaaaataaaggatgtaagaaatgaatgcatatgttaggcctcttgttgacctgtggactaaattgtttctccctgcagagatcagcaaggacaactcctgcaaagaaaactgtacttgttcctcctgcttgctccgggcccccaccataagtgacttgctcaatgatcaggacttactagacgtgatcaggataaagctggatccgtgtcacccaacggtgaaaaactggaggaattttgcaagcaaatgggggatgtcctatgacgaattgtgcttcctggagcagaggccacagagccccaccttggagttcttgctccggaacagtcagaggacggtgggccagctgatggagctctgcaggctctaccacagggccgacgtggagaaggttctgcgcaggtgggtggacgaggagtggcccaagcgggagcgtggagacccctccaggcacttctagagctcttcttcttccttcattggcctctccggatgttgaaacaaccacaggtcaagaaggaatgtgaatctgttgttttataagagtttaggacaaggacgtggaacagtggacactggttttccccaaagctggcagttttgtggaggggtagcttgtttcggtggtggatctctgtttatttttgcacatctgttataatttaatattcaaatctggaattaagaaaacatattttctagtatcctctaagggccaaagtcctacaatcggaatggattcatgccacgttgaagataaaattatcctctctctgaaatacggtaaagatttaaataggtcctgagactgttgatagccccagacatacccacagcattatatgtaacatctctcctgatcagtgccattcccacggtttcaaagaaaacagctacaaggaatgcttacctgagtgtctgcagcaccctccacttctctcctaggcaatgagacccagtggctagaaattcaccatgtctattctcaagatccatgccagggagctctttgactctcgtgggaatcccactgttgaggttgatctcttcacctcagaaggtctcttcagagctgctgtgcccagtggtgcttcaactggtatctatgaggtcctagagctccaggacaatgataagactcgctatatggggaagggtgtctcaaagcctgttgagcccatcaataaaactattgcacctgtcctggttagcaagaaactgaacgtcacagaacaagagaagattgacaaacttatgatagagatggatggaacagaaaataaatctaaatttggtgcaaatgccattctgggagtgtccctcgctgcctgcaaagctagtgctgttgagaagggggttcccctgtaccaccacatcgccgacttgtctggcaactccaaagtcatcttgccagtcccggtgttcaatgtcatcaatggcagttctcatgctgtcaccaagctggccatgcaggagttcatggtcctcccagtcggtgcagcaaacttcagggaagccatgcccattggagcggaggtttaccacagcctgaagaatgtcatcaaggagaaatatgggaaagatgccaccggtgtgggggatggaggcgcgtttgctcccaacatcctggagaataaagaaggcctggagctgctgaagactgcgattgggaaagctggctacactgataaggtgatcgtcagcatggacgtagaggcctccgagttcttcaggtctggaaagtatgacctggaattcaagtttctcgacgaccccaccaggtacatctcacctgactgtctggctgacctgtacaagtccttcatcaaaaactacccagtggtgtctactgaagatccctttgaccaggatgactggggagcttggcagaagttcacggccagtgcaggaatccaggtagtggaggatgatctcagagtgaccaacccaaagaggacagcctcggccgtgaatgagaagaagtgcaactgcctcctgctcaaagtgaaccagattcgctctgtgactgagtcccttcaggcgtgcaagctggcccaggccaatggttggtgtgtcatggtgcctcatcattctggggagactgaaaataccttcatcactgacctggtggtggggctgtgacctgggcagctcaagactggtgccccttgctgatctgagcgcttggccaagtacaaccagctcctcagaattgaagaggagctgggcagcaaggctaagtttgccggcaggaacttcagaaaccccccagccaagtaagctgtgggcaggcaagcccttcagtcacctggtggctaattagacccctccccttgtgtcaactccggcagctcaagacccccgagcaacatttgtaggggccgctgctagttagctacccttgcccaccgccgtggagttcgcacctcttccttagaacttctacagaagcaggttgcagtgagccgagattgcgccactgcacaccagtctggagacagagtgagagtccgtcccagaaaaaaaaaaaaaaaaaaagaacttctacagaagccaagctccctggagccctgttggcagctctagccttgcagtcatgtaattggcccaaatcaccggagccacgtgaccctccagtgtcatctccggggtggccacaggcaagatccccagtgattttgtgctcaaaataaaaagcctcattgacccatgagaaaaaagaaaacagcaatgagaagtgaccctgtcttgttggtttattactttttttgttataaagtactttggtgaattaacaggatgctagtattacatggtgatactcttcagaacacctgccccatcttttttatgcaagtatgtttacaatcagtggactatcagtaatgtcatttgctcaaatattttttaaagacctacagaaactgatggttattgggaaaacagtcaggaagtagtgaggtaatcaaggccatgggaatagtgtttgacaaagagagtactccaaatcccttttggttacccaggactttaaaaaagagagtactccatcacacctgtaatcccagcactttgggaggccgaggcgggtggatcacgaggtcaggagatcgagaccatcatagctaacatggtgaaaccccgtctctactaaaaatacaaaacattagccgggtgtggtggcgggcgcctgtagtcccatctactcaggaggctgaggcaggaggatggcttgaacccaggaggcggagcttgcagtgagccgagatagcaccactgcactccagcctgggcgacagagcaagactgtgtctcaaaaaaaaaaaaaaaagagtgctccaaatctcctttggttacccgggactttaaaaaatttaatgtgatagttaggccgggtgtggttgctcacgcctgtaatcctagcacttttggaagctgaggcgggtggatcatttgaggtcaggagttggagaccagcctggccaacatggcgaaaccccgtctctactaaaaatacaaaaattagccaggcgtggtggtgggcgcctgtaatcccagctcctcgggaaattgaggcactagaattgcttgaacccaggaggtggaggttgcagtgagccgagattgcgccactgcactccagcctaggcaacagagcgaggttccatctcaaaaaaaaaaattgtaataataataataacaatgtaatatttactttttcatcctttatataaggctgagtgcttcacccctgagatgaagctcagttaagaaataaatgaaaatcccgtaacctattggtgaaaggtaaccacccccagctcctactagcccaacttaaaacaggaccccatcacactacacagcagtttagccaagaaaagggggtctttatgtggacactgggagggaagggattccttcaaatccaaactttaaaggattttaaacaaatgaaacatttggttcaaagaatagctgatgtttttatttgatgattttggagaaaggaaagtgtggggcataatggggtttgttattggaaagatcagattttctaggtaatttgggtggagaaagacaaaaggcaaagctttgactgacaattccatgaaagtgctatttggttttggttatgggcttagaaaattaagacacttagttcaatttggaaggattctgtataagtccctgattaaaataagcaaaaatgatgaataacactgattcagtgcaaccgaaagattaggattaactcaaaagaaagttattttctaaaccaccgtgattttttccactgacaattacagcggttttcattaggttgctgacacatgaagtcagcctcaccatcagttgcaaactctaaactagcaaaatctattacagagacatacttatcacttctgatttagtgctaatctcacccagctcatcttctcttgtcagatttatgagataaatgtcagatttatcaccagatatattgaaagtaacagccagtaataaaatgtgagattttaaaaaatagattctttggcaaattggtgttcagtgaggcaattattaaacatttttgtcagccaggttccaggcactgtacagaagctgttaggagttctcaccatctacgaatttgatttgatgtattgtattctcattaagctatgtgtgacacattgtcatttattagcccagaatttaaaaagctgtggttgtttagtgttggtggtagcagaccccagcagtctgatggtctgcactccttccatcctgccaccccctggggatgcaaagactggatctcagggtgacaatcttcttgcgcacgactgcctggccaagtgcctccagaaagccccttccttcccccatttccacccaggcccacttgtcacctcagcctaacaccagcctgcacagtctacggccaccatccaggcagtgggagagggaaaggggaggagggtggaagggaaaacccctttctatacctctcctcagcctgctctttcctcctcccacctctgagcctccgcctcccccagacagagacagaaaagatggaagaacaggtgggacctccacccccaccccaagccttcatcccggtggagggggatgggaagatttctctcatttcaagagactcctccacctcagactgacaaaaggcagaggcctggcaagaagaaagggcaccctggggaagaagggcattgaaatagcacctgccgggccgggcacggtggctcacgcctgtaatcccaacactttgggaggccgaggcgcgtggatcacggggtcaggagttcaagaccagcctggccaagatggtgaaaccccgtctctactaaaaatacaaaaagtagccaggcgtggtagcgggtgcctgtagtcccagctactccggaggctgagacagggaactgcttgaactgggaaggtggaggttgcagtgagccaagatcgtgccatgcactccagcctgggcgacagagtgagactccatctcaaaaaaccaaaacagaaatagcacctgcccccaccccctgcccgccctccttcccgcccccgtcctttcctagacttcactcaagtcctctgctcagaggaagccctgctctactgaaagccacaaggccattctcggtggcctgggacagcagcccaagacgtgggcttctaactgcctccgaaggggccacagcagcaaacataaataaaaatagtaaaatgttcttaaattataaatttaaaatttggaaaatttagtgagcacagcttctagggggcatgtttccaaaattccaaccacaaaagtgcagtctcaaaactgactgtaaaccgaacataccatctcatctcagacacagctattgttcacgagtgtcagtggaactttcctcccttgagatggaccaaaaacgtcaagcaagatgacatttgctgatttgcaggcttcaggcagataagatacgggcagagttgagtgtgcgcctttacccttaaattcaggaatagcaggaacagcaggaaaaacgtaggaccacagcgtacgtcccacttgtctttcattttgatatcattatttccagagtcctgattgctagtcatgtctaacactggatttattatcatctcattgctagcatggctaggaaagctttgaacatccttatcattctattttaattcctattataattgcatggggaagttccagggtggaaaaatttccttttctttctttttttttttttaataggagagttggctgggcacggtggctcacgcctgtgatcccaacactttgggaggccaaggcgggtggatcacctgaggtcaggagttcgagaccaacctggccaacatagtgaaaacctatctctactaaaaatacaaagttagctgggtatggtggtgcacacctatagtcccagctactggggaggctgagacaggagaatcacttgaatacgggaggcagcagtgagccaagatcatgccactgcactccaacctgggagagacagagtgccatctcaaaaaaaacaaacaaaagagttgatataaatttgctgttataatttgactgtactgtttcttgcacatgttgacatctgtaatgactggagtttatgaaaatttttgatgagtaggagcataccattaacagagagaaatttaatcaaaagatttttaaagttccttcagagtccagactttgactaagtgtagtatgatttatatctatgttgcatacaaaaatatcaaacagtaattcccaactgaaatacaagtatcaatcaattgtgtaacaatgcaaaatcatttaatttaaagttaatttatagcaaatgagtactgtaatagcataagcatgccgatactttacaaaggagagagtggaaaggtaggatattataactaattgatcaaatcattgttaaaatttaagtttattaatacttttacttctgtccgtagggatccatgttaaattgggtatattataaacttaactgctaatgatgaggtccttttgctattagaaatctattttttatttttctttattattttttgaggcagggtcttgctctgttgcccaggctggagtgcagtggtgaaattatagctcactgcagcctcaacctcctgggctcaaggaatcctcctgcctcagcctcccaagtaatggaaactgcagtcgtatacaagcacacccagcaatttttttttttttttttggtagagatggggtttagctatgctgtccaagctggtctcaaactcctggcctcaagtgatcctcccaccttagcctccaaagtgctgggattacaggcgggagccaccattcccagcctagaatgaaatatctttagctaaattacagggctggatgtggtggctcatgcctgtaatcccagcactttgggagactgagggcgggagggtcacttgagatcaggagtttgagaccaccctgggcaacacagtgagaattctgtctctattttaaaaagagaaaaatctagggtatattctcttaaacaaaactttcatctataatggtagttgatgaggtcctatgtaatatgcatttccttggttgcaatagcaaattactacacacacagaaaggaaagccacactccccgacacatctacacacaggaggactcacacaggagggagactcaaagaaggcacgtgacttttacattgttagggcttacatggtcctgggatttcccaccagtactcaaaagatcaattgtatgaacaagtcacctatttttacggcactaaataattattattcaacaacatggaaaatatgtggtagcagacctggattttccttaagagttatttttatgtggtactgccccctgctggaatataacatctatacacatcctttctggctgggctgacatcctaaaaccagcccaggaccagccttttattaatattaattcttggccaggcgcggtggctcgcctgtaatcccagtactttgggagtccagggcgggcggatcacgaggtcaggagttcaagaccagcctggccaacatggtgaaactccggctctactaaaaatacaaaacttagctgggcatagtggcacattcctgtaatcccagttactcgagaggctgaggcaggagaattgcctgaaccgggacccgggaggtggaggttgcggtgagccgaaatcgtgccactgcactccagcctgggctacagagcgagactccgtctcaaaaataaataaataaaaattaaaattaaaaaataattcttggttgtatgctaaaagccttgcaagtagccccactggaagataggaagagtggggctgttttacaaatgagcacatataagcagaacgaggccgccataattgaaatgaaggtccccgtcccgtggatgtgttcatcgctacttcaccctgtcattcggatccaatgtgtgaccagccagctccaataacagttccatactctgggaattatttttaacactcggcaggatgctttcttcctgtagttttaggcttagccctttgtgcacttttggtctctttccctttcaatttagcatccaaggaagcggctgtgaccaaaggtagctgtcatgttaaaggacaaagttcatagttacagcaaatattgacccagagcactatccttgccccttcctctataatgtgcaatgcaaaaatatgttcttttaagtacaatattaataagtaaggtctaggagattttcttcccccttcctttctcttttagatgagtaaatgttttatctagttttgaggagactatccttcttatcacatctctttccacttctgctctccttgttttataattttcctctcctttgggtccgtgtcattatttcgtgtcgcttgttttcgagccatgcactcatttatcaaatcagatttcctccgtatgccgacggccttcctctccctgccacgggcttcctttttccctgactatgcagaagcaatttgttcgcttgtgtttctttttttttttgagacagagtctcgctctgtcacccaggctggagtgcagtggcgacatctcggctcactgcaacctccgcctgtcaggttcaagcaattctcatgcgtcagcctccagagtagctgggattacaggtgtttgccaccaaggctggctaatttttagtagagacggggtttcaccatgttggccaggcttgtctcgaactcccaacatcagttgatccacccatctcggccttccaaaatgctgggattataggcatgaaccaccgcatctggccttgtctttcatccttaatgacactttagtcctaataatgctaaaatcattttctactctttgaattgaaacacagcttatctacatgagcccaaggcagtagcaacattcacctccatttcttctctgatctctaccttctgaaccctgtggacttggttgtaaatggatgagggcaagtcttgcttccttcccctgtgtttacagaggatcgtggctgagatgctgggccacactctgggcctgctggcacccctgggccggtggctgctgcccctcagggtgctcaccacctagaccagaagaaccaaggtgagggagagcctgttttctttcttcctgtggctgcgggggctgtgaggcatgggtctagtggctgtgtttagctggggatgcctcctagaaatcagctccaccgttgaagagatcaaagcaatgcacagtgccacttgaaatgaaacgattgagcttatcagcgcttttgcaaatgtacaagagggtagctcccccggacatcctgaactgagccatgctcttctattttgtgtaacagcccagtgacccctgaatcttcccctgaggcaggtccccgaagcttcatggaggatgttcctcagctgaccaaggtgaggctcttgagctcctaaatctttgtgatactgtttatacatctttgtgctgtactttttaagctgacttcgtgttatcacctgtatgattttatgttttgcttctaaataagtacagattattttaaactctaataatgggtgctacaaaattaaagattatgtcaatcactgtctctgatgagttattttatgtagatttcaacacaatcattgattcatgtgtactcttggtcagtcatcagtcatctgagtacctagtgggtttccaaaatgggtcctggatgctggggatgcaaagataagcaacacatttctatcctcaacagcctgtagatgagggagaatcactgcggacaatcagggaagttaccggagagagcagtgcacatgtggtctagaaactggtggaacaaagttgagaatcactgaactaggaggaaagacaggtcactgacaatccaaggcacagtgactcacactctaatctcagcactttgggaggccaaggcaggaagatccactgagctcaggagataaagaccagcctggctgacctatggagacccttctctaccaaaaaaaaaaaaaaaaaaaaaaacattagcctggcatggtggggtgtgcctgtggtaccagctattcaggaggctgaagtgggaggatcgcttgagcccgggaggtcaagactgcagtgaatcatgatcacaccattgcactccagcctagggaagagagcaagaaagaccctgtctcaaaaacagaaaaaaatccagtaaaatgtttcagatgttgttaaaggtgatttcactgttacttttcacctctcctcattttacatctctgacctatgcttgtcctctgacttgccagacattcctagctatggacttgatgtctcgacatggaggctcacaggcaccccaaactcagcctgccctaagctgaacccatgatctttccttccaaacttgtttctcaccagagttcccatcttatcatccacctagttgttcaagtcatccttaagacctccctctccttcactgtctattctacctccctaatatctcttaaatccttccctcctctcccacctcacagccaccatcctaacctaagcagccaccctttctcaccctataatgacctcctggctgttctctatagagttggtgaatcctttcgtcttcagcctgaaccccctttcgagggattcttatatatatacatagatatacacaaatatatatgtacatatgtacatatgtgtgtatatatgtacatatgtgtatggatatacatatgtacatatgtggatgtacatatgtacatgtgtatgggtgtacatatgtacatgtgtatgggtgtacatatgtacatatgtgtatgggtgtacatatgtacatatgtatatgggtgtacatatgtacatgtgtgtatgggtgtacatatgtacatgtgtgtatgggtgtacatatgtacatgtgtgtatatatgtacatgtgtgtatgtacgcatgtacatatgtgcatgtatgtgcatgtgtatgtgtgtgtatgtacacgtgtgcatatgtgtgtatatgtgtacacgtgtacgtgtgtatatatatatatatatatatactggctggagtgcagtgggaaagttttggctcaccacaaactccacctcccaggttcaagtgattctcctgcctcagtctcctgagtagctgggattacaggcgtgcaccaccatgcccagctaatttttgtatttttagtagagacggggtttcaccatgttggccaggctggtcttgaactcctgacctcaggtgatccacccacctcggcctcccaaagtgctgggattacaggcgtgagccaccgtgcctggccggattcctatcttgaagacgaagccccagaccatcgacacggcctcaaggccctgcatgacgcctcctgccccaacacctcgtgtcatcttgctctcctctcccgcagctcctgaggctttagccaccctggaattccaagtccccatggtcatttttttttcctgctcaagatatcaccatgtgctgtcccctctgcccttgtctacacccacgtgtccttctcccgccccggccacactcatggggcacactgtccttccctggctaatcctcccacactcgataccactttctctgggatattgcacccgatcttcagccgcagttgtcttcctatgacccactcccacagctctcgccacaatggtaattgtttgattcctacttgttgtccctgtgagactgcaaaccccagaggacaggggccctgggttctccttcgcctctggatcatcagcactaactgaatacctggcctagaagagatgctaacgatgctgaatgaataaataagtggaaagactctcagtaaagcaaaacctttctttaccattttatggccgtcaaggaggaaaacacattatcagtggaaaacgcaaaatgaggggatttgcttagcaaacgatgaattcctctggcaccctggcagccttggtttcttttgatgaggtccacccccttccatccatcttctgggcttaagagatcaaagcaaaacatgctgtggaattcgatactggtgcaggttgcacaacattgtgactgaactaaaagccactggatggtacaactgaaaatggtgaattgcgtgttgcatgaattataacctaactggggaaaaaaaggcttaaaaagagacaaagcttcccccacaatggaaaggaaggtataatagaaacagcagctctcaaaccttggcaggataatgaaaccccgtttctatttttaaaaattagctgggtacagtggcacgtgcctgtagacccagctactcgggaggctgaggctggaagatcgcttgagcccaggagttcaaggctgtggtaaactataatcacactactgcactccagcctgggtgacagagaaagaccctgtctcaaaaaaggaaggaaagaaggaaggaaggaaggaaggagggagggagggagggaaggagggaaggaaggaaggaaggaaggaaatagcagctctgagcttagaaataggagtctatttctaagtgggagatggggagaaggagggaactggggaggtgaggaagaagcaggtattgtcaccagtgaggactgtgctgttgtgagcccagctaggcaactggcaattccattctgttagtgacagctacaataacccaaagccctctggagccctgctttcctctgctctcttcgtggcttgactaggagctgaagatcctgtacctcttagagcatctggggcgctgggccctgcagcaaatcccatcctccacccaccccgcctccctccaccctccacccaccccacctccaccctcctccacctgctgcctcgaggcccctcccactcccggggtagacaaaacagtttagaggctgaagtcaccggggctgtaactgttggatttgcacatgtcatagaaaatcatcatatgttttgtgtggactccatgcataacaacaagagaaccaaccagaccccatagacagaagggagtgtgaattggagacaaaatttaaattatgagttgccttctattcagatttctcccatttttaacaaaaaggagcccaaattcctaaatgttatggttgtttgcagcaacttatcatctttctcctttccttcatagccaaggtttttgaaagagctatctgaggccgggaatggtgactcacgcctgtaatcctagcacagaggctgaggtgagtggatcacctgaggtcaggagttcaagaccaccctggccaacatggcgaaatcccgtctctactaaaaatacaaaaattagccgggcatggtggcgtgtgcctgtaatcccagctactcaggaggctgaggcaggagaatcacttgaacccaggaggtggaggttgcagtgagccaagatctcaccactgcactccagcctgggcaacagagtgagactccatctaaaacaaaaaaaaaagtagctgtctgttctttcttctcgaactctttttcccgctggagtctgtgacctgctgccgtctgcctcaagtgagagggactagcagatctggtgaattaccttctaatgcccgtaccctgcccataccagcttcaatctgtatgtagaagcttagcttgctccatgcatggcctccagcatccactggtcacaaaataacacaaaatagcatgagagagaatggtcgcatggagcggaggagctgctgagactgaacccaagccagggctactgctgggtggaactggacatgcccagcccatgggaaagtcttcccacagaagtcatatttgcaggggtctcccaggagacagcacattctgagcaaaggagtgaggcagagataactattcaggaaccaagagactcgctggaaagaagcagagattttcagcccagcgtagtggatgtttcttgaatcttcccctgtggatgccccaaaccttgagatccttccaacaaatagcacactactaacaaactgtgactcaaagagagggaaacatggtcccctgctctgtcacaaatcactgtgaagctttggcaccctgactgctcaggtggccaccaacacagaaggaccacgaatggctgagtcaggaagtcacagccgtgtggctggaagaggctctgccttgctctgggagaaatgcctatccccaaggaagccttagtatccatgggagagaaacactgtagcaatggcccccaggactctcgggaagccacttctggtgggaggggactcaaagggtgctgggggacctgtgtctgcatctggaagtgaggagccaggaaaattttctttcagtttctttcttttttcttttctttttttttttttttttttgagaaagggccttgccctgtcgctcaggctgaaacatagtggtgcgatctcggctcactgcaacctccacctcccaggttcgagtgattctcctgcctcagcctcccgagtagctgggactacaggcatgcacccccacccacgcccagctaatttttgtatttttggtagagatgtggtttcgccatgttggccaggctggtctcgaactcctggcctcaagtgatcctcccgatgtgctgggattacaggtgtgagccaccacgcccggcctctttctgcttcatttaacattaatggtcatcccacagcatggtgctgtgcacctgtagtcccagctactcaggtggctgaggtgggagaatcacttgcgttccagctgtagtgagccttgattgtgtctgtgaataaatgccacttctctccagcttgagcaacatagggagactgtctcttaaaaaacaaaacaaaacaggctgggctcggtggcccacgcctacaatcccagcactttgggaggccaaggcaagaggattgcttgagcccaggaggtcaagagcagcctgggcaaaatagggagaccccatctctacaaaaagataaaaaataaaaaaattaactgggcatggtgatacacctgtagtcccagctactctggaggctgagataggagtattgcttgagcctgggaggtcgaggctgcagcgagccatgatcatgccactacactccagtccaggcagcagagtgagatcccgcctcaaaaaaataaaacaaaacaaaactcatctctcccttggctcctgagactacaatccctcacggttcttttctacttctctgtttttctcttcttgtctccctttttttctggtctctctgtcacccaggctggagtgcagtggtgtgatcatagctcactgcaaccttgacctcctgggttcaagagatcctcccacctcagcctctcgagtagctaggactacaggctcacaccaccatgcctagctaatatttgtagattttgtagagatggggtcttgctatgctgtccaggctggtctcaagctcctggcctcaagtgatccacccacctcagccacccaacgttctgggattacaggggtgagccaccgcgcccagccgataattgttgaaaaatcattttcagttaaggtatccagtcaaggtcagaaaatgagaaaatgttaaaaaaaaaaaagctataagtaaaacagattcagtcgggacatgatggttcacgcctgcaatcccagcactttgggaggttgaggtaggataatcacttgagcccaggagttcgagaccagcctgggcaacatagcgagaccttatccatacaaaaaaatttaaaaaatacccaggcatggtggcatactcctgcattccctgctacttggatggctgaagcgggaggatcccttgaactcaggagtcagaggctgcagcgaaatatgattgtgccgctgtactccagcctggttgacagagcaagactgttcccccacccccctgaaaaaaaaaaaaaaacctaaatccaaattttaaaagtttccttgactcttcaacttgctcaccctccaccaaataaaataactacgaaggaggcttattttttactatttccagggatacgatatatgtttgtcctgaaaatatacatcatggctttactcaagccacagtgatgaggcctcattgtcactgtagcctaattacgattttataactccatttaaaattcaatttaaacacagtttaaaaattcagtccaagtcaaacatgctctcagtagctagaagcaaaactctgttcaggtccttgatggatctatttgtactttctttcatgaaaacagaaagtccttttttacacaccatgcaacaggaaaattcataacggacattgttttacctgttcttggcaaagacaagtgagctcttaacaagcaaggtaactatggagatgatgttttgctccaagttaacacttacatatttaattagaaagatttcaaaggtgggcagattcactggaaagtttccaaaagcttcacttgttcaacaaataatgttagagagggagcaccgtgccctcgggcccctaggaattagttccacatggtccggtcctctgtccagtgtgcccagcatccacttgggagaacagcatggccttctgtccagggcagcccacgccagcactgcctgccctttcaggcccatggctcccattaagtgccatttcgagcatacttagccaagtttccctaccatggccaacaaagaggttgttcaaaaatgcttgtcaggtcgggcatggtggctcacgcctgtagtcccggcactttgggaggctgaggcgggtggatcacctgaggtcaggaattcaagaccagcctggccgacatggtgaaaccccgtctccacaaaaatacaaacattagttgggcatgatggcgggtgcctgtaatcccagctgctcaggaggctgagacaggagaattgcttgaacccgggaggtgaaggttgcactgagctgagatcacaccattgcactccagcctgggcgacagagtgagaatccatctcgaaaaaaaaaaaagtttgtcaacggtttcactgaatccagaatacttttctaaaatgtcaaccctatagaatacattttataaaattatgaaggcctggtctggtgtagtggctcacgcttgtaatcccagcactttgggcagccaaggcaggtggatcgcttgaggctgggagtttgagactagcctggccaacaaggcaaaaccctgactctactaaaaaatacaaaaattaactgggcgtggtggtgcacacctgtaatcccagctactcaggaggttgagacaggagaatcacttgaacccaggaggtggaggttgcagtgagtggagattgcgccattgcactctagcctgggtgacagagcaagactctatcttcaaaaaatagataaataaataaaaattaaaacaaaataaaattatgaaggccttaggtcagagaattaccgagggaatattcaaagttatacctccaagtatctacaatgaagatactttcatcagaaaaaaggagtttacggccaggccctgtggttcatgcctataatctcagcactttgggaagccaaggctgaggcaggaggatcacttgaggccaggagttcgagaccagcctgagcaaaaacgtgagatcccatttctaccaaaaataaaaatgtaaggtaggcatgcaactgtagtcccagctactcgagaggctgaggcaagaggatcgcttaaacccaggactccagcctgagcaacagagcgagaccctgtttataaaaaaaaaagaaaaaaaaaaagaagaagaagaaggagaagaaaggaaataaaatttaagaaaaaaaaaaggacttaataaggttgaatgaaggcaagaatattcttagctctgtttaagtcaagacctgagtagtagctctacgtagctgtatgtcgataatgtttttgagacagcactactgataaattgttacataataaactgttatggctggatgcagtggctcatgcccataatcccagcaccttgggaggccgaagtgagtggatcacctgaggtcaggagttcgagactagcctgatcaatatggtgaaatcccatttctactaaaaaaataaaaattagctgggcatggtggcgcacctgtaatcccagctactcaggaggctggggcaggaggattgcttgaacccaggagacagaggttgcagtgagccgagattgcgccattgcactccagcctagaagacagagcgagactccatctcaaataaataaactgttaaattaagtttagcctaaagctacccccttacatattttaagttcagtctaaaggtttccctgcacatagtgaactgtaacctaactggatgcgtaaacagactataacctactcttgggccagtcactgagttttggtcaatcaaaggcagccaactgttcaaaccaggttaaaataaggcagatgctgagctctaaccagtccagccatttctgtaccttgcttccattttctgtccatcactttcccttttctgtccataaatcttccaccacgtggctgtgctggagccactgtgaaactattctgtttcaggggctgcccaattcatgaatcattccttgctcaattaaactctgttcatttaatttgtctaatatttttcttttaatcaaagtaatttggccgggcacagtggctcacgcctgtaatcccaacacttcgggaggccgaggtaggtggatcacctgaggtcaagggttcaagactagcctggccaacatggtgaaaccccgtctctactaaaagtacaaaaattagccgggtgtggtggcgggcgcctgtaatcccagctactcgggaggctgagggaggagaatcgcttgaacccgggaggtggaagttgcagtgagctgagattgtgccattgcactccagcttgggcgacagggcaagactctgtctcaaaaaaaaaaaaaaaattaattcagagacctactcatgtgaagttgtatttttttattctccatattacaaaacagaacaattggcacagggatgaagaaatactttgcaaaacatctagagaggttaaatgccatgagtctttaaaatgtaagactgctttcacctgagcaatctagtgtccatttctagagctagcttaaatgtccgtgtaaatccccgtaattggttgggataacaattacctatgttgtataacttgagtcaaaaactacgtttccactgcctgccacccctatggatggttttctcttaaggtatcaaattttactgggaaagacctagataaaatacagcgaaaatgaggcggggcgtcctggcacatgcctgtaatcccagcgctttgggaggctgagtcagaaagatctttgaattcaggagttcaagaccagcctgggcaatatagtgaaatcctgtctttacaaaaaattaaaaattagccaggcatgggggcatgggcctgtagtcccagctacttgggttgggtgactgatgtgggaggatcacttgagcccaggaggttgaggctgcagtgagctctgaccatgcccctgcactccagcctgggtgacagagcaagacccagtctcaaaaagaaaagaaaaagagtaatgttaggtcaaggtagaacctaccttgactttctgttactatggaagatattctggggtatctctgagatccaagtattatggcacttaagtaattcctatctattgttctacttggttcctcgggagtaaaagtcatattcaaaccaaaaaggctgtgggatttccagaattttaaaagcaataatagttaatgttctcccatgggagttactccacatttttacatatgttccatatgttaactcatttagaccttacctttatgaggtaagtcctcttcttatccccactttagaggtgggaaaactgaggcacagaaagagtaagttgcttgcctaaggccctgttactagcaggtggtgaaaccagcattccaacccgggagtctggcaaatgtgtgtgaagagcacacgtttggaaatgacagtcatgaggacactgtaagacttctggaatgtttataatttcacctttgcttgttatttttcctgtctgtttccctagagtgagctgagtgaaaaaagaaagaagaaagaaagaagaaagagaaagagaaagaaaggagagaaaaagaaaaaagaaaagaaaaacagaaaaagggaaagaaagaagaaatgaaagaaagaaaagaaaagaagaaagaaaagaaagagagaaaggaaggaaggaaggtgggaggggaggaaaggaagaagaaagaaagaagggggacagagggagggaatgaaggagggagagagggagggaaggaggaagaaataaaaagatgaggatctgtatgcttgaggggtggaggtggggggcttgggtgggagtgtgggatgggcagaaagctggagggagccctggaccgactgcattccacagaggattgtgggtgcaacgtaggtggcagattgagaaaagcaaacaaacaagctcagcctttggagcttcggggaagaaaaaaagctgagcagtgaatgctggcttcccacggagaaggcaggctgcttcgccagctcacatccttccgcgcacccacttcctctttccggaggtcactttagattgctttatggcaggatctccaggtcacaggaatgttatgtttcgactggggtttccccctcccctgggatgcctgggccagctccccaagggctagtctctgtcccaggccccacactcccatagcactcagcaaaagcctagagagagcaccgcaaaatgccaaacgcaacaggaccgcgtaggaagaagacgcttggaatgacagggacactagaactgcccatggtcgtggtctcaaatttttgttccatggtctgaaatactaaaagttcttaaacagctacttgatttcatactattgttttgaagaaaacagtgtttgtttgttgttttgtttgtttgtttgtttgagacagagttttgctcttgttgccgagtttggtccatgttggtcaggctggtctcgaactcctgacatcaggtaatccacccacctctgcctcccaaagtgctgggattacaggaaaacagttgtttctttaaaacaattatataggctgggcacggtagctcatgcctgtaatcccagcactttgggaggctgaggtgggtgaattacctgaggtcagcagttcgagaccagcctggccaacatggtgaacctccgtctctactaaaaatgcaaaaaattagccgggcgtggtggtgcattcctgtaataccaggtactcaggaggctgaggcaggagaatcacttgaacccaggaggtggaggttgcagtgagctgagatggcaccactgcactccagcctgggcaacaagagcaaaactccatctcacaatctcaaaaaaataaaataaaataaaataaaataaatggttatataagctaccttattgatgcagttacaaatgagccgctgaaacatataaattttaaagaacaagccacatatctttcatcacccacagcttcaccaactaaaggtgtatgtagtacttttgtggaaggcatttccacatgctttgagggaccttgaaatactgctatgattacatgatttttctaaaaccagactactcctacattacaagaattgaaaagttcagagtaaatatttgtaagacctagaaaagatgatgttctttaaaaaaaacgatgcccatctttgtagcgaaaagaaagagagatcagactgttactgtgtctatgtagaaacagaagacataagagactccattttgaaaaagacctgtactttaaacaattgctttgctgagatgttgttaatttgtagctttgccccagccactttgacccaactactttgacccaacctggagctcacaaaaatatatgttgtatgaaatcaaggtttaagggatctagggctgtgcaggacgtgccttgttaacaaaatgtttgcaagcagtatacttggtaaaagtcatcgccattctctagtctcaataaaccaggggcacaaggcactgtggaaagccgcagggacctctgccctggaaagcggggtgttgtccaaggtttctccccatgtggtagtctgaaatatggcctcgtgggatgagaaagacctgaccatcccccagcccaacacctgtaaagggtctgtgccgaggtggattagtcaaagaggaaagcctcttgcagttgagatagaggaaggccactgtctcctgcctgcccctgggaactgaatgtcttggtataaaacccgattgtacatttgttcaattctgagataggagaaaaaccgccctatggcgggaggcgagacatgtttgcagcaatgctgccttgttattctttactccaccgagatgtttgggtggagagaaacataaatctggcttacgtgcacgtccagtcatagtaacttcccttgaacttaattatgacgtagattctgttgctcacatgttcgttgctgaccttctccttattatcaccctgctctcctactacattcctttttgctgaaataacgaagataataatcaataaaaactgagggaactcagagatggtgccggtgcaggtccttggtatgctgagcgccggttccctgggcccactgttgtttctctatactttgtctctgtgttttatttattttctcagtctctcgtcccacctgactagaaatatccacaggtgtggaggggcaggccaccccttcacatcttgtctccacttccttgattaaaaaaaagaaaagaaaaaaaaatttgccgaagttggattcattcacagaattctacacattaaaaatgttgcaggtcgggtgtggtggcagctcccaaagctgcctataatcccagcgctttgggaggcttgagcccaggaggtcaaggctgcagtgaactgagatcgcaccactgcactccagcctgggcgacagagcaagaccctgtctcaaagaaaaaaaaaaaaacagaaaaaaataacgttacagaaaaagtacaatatttttaatatatatatatatattttttttttctgagacagagtgttgctctgtcacccaggccggagagctatggctcgatctcagctcactgcaacctccacctcccgggttcaagcgattctcctgcctcagcctcccgagtagctgggattacaggcacccaccaccacgcctggctaatttttgtatttttagtagagacggggtttccccatgttggccaggctggcctcgaactcctgactttatgatccgcctgccttggcctcccaaagtgttgggattacaggtgtgagccaccatgcccagccaaaagtacaatatttttaatgacatataaagatgttcattctttgtggttgccctgggtgagagggactattgatactcaatagtgtttcttttgtttctacattgtttctatagtgaaaatacgcattggctttgtattaaaaaatgtatagtaaaaatggttttattaaaaatagcaaataactacaaaaactccattgcaatggaaagcagcccttggattttctagttgaatgaaacgagtaatttatccaatgttagaaatgtctaaaggctcgctcaggtttcatgagcagaacaggaattgtatatccaattaaatgtgaaattgcaatgcctggtgcggtggcttatgcctgtaatcccagcactttgggaagccgaggcaggggatcgcttgagcccaggagttcgagaccaccatgggtaacatggggaggccccatctctacaaaaaataaaaatcgttagccgggcaggttggtgcatgcttgtgttcccagctacttgggaggctgaggtggaaggatcctctgagcccaggaggatgaggctgcagtgagacatgatcgatgcactccagcctggatgacagagtgagaccctgtctcaaaaaaaaaaaaaaagaaaagaaagtacaatcgcaattaaatgtctttgcgttggtggctcctgaccaaattccctaagcaagcagtatgttaatgagcagaggggccacagctcaccttgctcaattaaaggcaggagcaggccgggcgtggtggctcacgcctgtaatcccagcactttgggaggccaaggtgggcggatcacgaggtcaagagatcgagaccatcctggccaacatggtgaaaccctgtctgtactaaaaatacgaaaattaactgggcatgtggcatgagcctgtaatcccagctactcgggaggctgaggcagaagaattgcttgaacccgggaggtggaggttgcagtgagccgagattgcaccactgccctccagcctggtgacagagcgagacttcatcttaaaaaaaaaaaaaaaaaaggcaggagcaagtatgggccagacagaaatcaaggtgtaaattgggcagatcctcaggcccagtgctgaattttggtttgatgaaataaaacattacatttcaaggttggcagagaggaatgaaggtggaagaggaatctagggccatttagggaagccatgaagcctcctgcccacactagtgggtagagtggagccaggcgttttgctagggcttgctatatctcttggcagggtgctctgctgccaaagccaagaattctaaattagattaaatagccagaaagaatgttaaacatttggacatgatatcctccctcacagattagctagagtgtagttctgctgtgctagatacttaaataaatacctccctagctgtgaagcctgcttatcacagtactatattttaggatgaggtcattattttcctatgcatacacatgcattgtataatcttgccaatgtaggtcagcccaaaagaagtgacaaatgtgtagaacacacattggactagcttgggacaaaattagtatacctaaagatgacagatttcttaactaattttatgagccatgcagctttgtattctagcagagacagacattaggaatcttataaaatcaaaaattttaatttttgcctgaatagctccaaagggctaagatctcaagcaaatgcgtgtaggttttgtttttgtggttgttgttgtttttagagacagggtcttgctctgtcacccatgctgaagtgcagcggtgcagtcctagctcactgcagccttgacctctcaggcttaagtgatcctcctgccttagcctcccgagtagctgggactacaggcgcatgccaccaccccgagtaattttttatttttatttttacttttgtagagacaggggtctcaatatgttgctcaggctagtatcttttttctttttgagacagtctcgctcaattgcccaggctggagtgcagtggtgccatctcggctcactgcaagctccgcctcccgggttcacgccattctcctgcctcagcctcccgagtagctgggactacaggcgcccgccaccatgcccagctaattttttttgtatttttagtagagacggggtttcaccgtgttagccaggatggtctcgatcttctgacctcgtgatccacccgcctcagcctcccaaagtgctgagattacaggcgtgagccctcgcgcccggcccagtcttgtaacttaactttaaagctacttattcccaaatgaagatgggatggtacacagattttaagtattagctggtttggagcttctgtcttttaaagcaacattttactttgccacagggtggtggggcgggggccatcctagaaagaagagtgtgagtttcatgggatagggtctggggaggtggctggaggagtttaggttcttttgatatctgtggctacacagacagataaccaaggaaaatgtccaaacagtgaaattaagtgctcactgcactaacacagagaaggaccctgatgtctggccgcaggcctttgttctcattggcttcaaagaacttcttgatgtctaccttaatttcattattatttacccaggagtcattcaggagcaggttgttcaattgccatgtagttatgtggttttgagtgagtttcttaatactgagttctaatttgattgtgctgtggtctgagacactgtttcgatttcagttcttttgcatttgctgaggaatgtttcatttccaattatgtggtcgattttagagtaagtgccacgtgacgctgagaagaatacatattctgttgatttcgggggggagagttctgtagatatctattaggtccacttgatccagagctgagctcaagtcttgaatatccttattcattttctgtctcgttaatctgtctaatattgacagtggggtattcaagtctcccactattattgtgtggaagtttaagtctctgtgtaggtctctaaaaacttgttttatgaatctgggtgctcctgtattgggtgcatatgtatttaggagagttagctcttcttgttgaattgctccctttaccattatgtaatgcccatctttgtcttttttgatctttgttgggataaaattacattttatgtcccccttcctatagtttgtcactgagggttggcagaagttgaaaggaagaagacatttgggtgtttggtttggggttatattaggttataaggttcattgcctccacctctttcaaaacatttagtttctaaatgaatccagctttaaatgactgcaggagtgcccatgcacaattttgtttctcaaatctttgggatttttccttgaagaatattcacagggaatggggctgtcttgcttcatagttactcttttgtatacatgatctcaagaatcgcctgatcactgctagagttaaaccaatacactaactgcctgaagtgctgaaaagtcaaatgggggcttagaacctcactccagatcctacacaagctgatggttctgttcccagaaacaacccagcttcctcatcatctatggccagtgccttgtagcggagctggagatcaccctttagtgggctcttcagctggatctagaaatcaaattgacaccaggcagattaacaagagaaaagtatacagattttattgcttttatatgtacttgggaatctgcacaagggcaaagtccgaagaggtggccaaagcaaggtgcttttatacatttttagaaaaagagccaaaaaattggagaagaaatgataggacaaagaaaatctagccaggcagtaaattttctaggagaatcactaggacatatatgaggaagggtgtgtaaaacaggtgaaagataagggctagttcattaaacatgtttactctggtccattgtagcctctacgataaggagtattttctcgctctggtgtggacagggcacgcctcccagagcaacctttatcacttactgcatgcaggaagagacaggtcagcccgcccttcctgaaactacaatttcttcagtgttttcaactcaaaataatcaataccccccatctggcatatctggggatggcacgtcctttactccttcaggctcttctccctgaaggtcctttgcatagttgggaatctccaccaggaggggtagctctttggtctaaacccatggtggcagagtttcgacaatattcccaacttaaatgtttctgattctgagtggtggttagatccctttgtacacccctgtccccagtgcctacagaatgggcatgttaataagtgttggctgaacattcaatgatggataaggaagaataggaggcaagagagacggtggtctccagtgccaagccccagtgctaactggggtgattttttttcatgactcattttcctaaaatcaccctcaagggtcctacaaaactcttcccaacagctaaatcacagactaatctggcccatcgacgtcttccctgattatactaatttttttgtgtttttttttttgagatggagtcttgctctgtcacccaggttggagtgcaatggcactatctcagctcacagcaacttccacctcctgggttcaagcgattctcctgcctcagcctcctgagtagctgggactgccagcatgcgccaccatgcccggctaatttttttttttttttttttagtagagatgagatggggtttcaccatgttggccagggtggtcttgaactcctgaccgcaagtgatccgcttgcctcggcctcccaaagtgctgggattacaggtgtgagccactgcgcccgaccatatattaatggtttttgatgaatttgttccatagattaaaatcttgtgccccatcgcgtgtggggctccatcgcatgtggggcacagggttcctgagtgtttgtggctgtcaaaccaagatgatttcttgcttaatcaagcagatttgaaagttcatctctgctaccaggaagcacttgctcaactcagaagacaatgtcctatcagtctttcactatcacgcatctgttcttcaagatccgtcaaattagctccagtgaaacggaggctaaagtgaaactttttctcttatatagatttttattcataactagggaaaaattaggcacccacagaaaaataataacctaaaaaaattaggctgaacgtaagaaaaatttgtgatgaaataaacatttcaatcaacagaaaatatttttctgactttttatgtgccaccattagttacatcattgagaaaacaatatttgtattaaaaaaagagctggtgaaaatctggcaattggtcgggcatagtggctcgtgcctgtaatcccagcactttggaaggccgaggcaggcggatcacttgaggtcaggagtttgaggccagcctgacccacgtggtgcaaccccctctcaactaaaaatacaaaaattagctgggcgtggtggcaggcgcatgtaatcccagctactagggaggttaaggcaggagaattgcttgaatctgggagatagaggttgcagtgagccgagactgagccactgccttccagcctggtgacagagcaagacttcatctctctctcttttactttttttaaagacttcttctcaaaaataaaaagaaagaaagaaaatctggcaatccagtaaaaactggccactatggcatgcatgtgctatgcataaacgtaaattgatgcataaacttaattttagaactggaaggaaatctggagttctttaggagccaggttttacacatgcagaaacctaacagcttcagtttcgattcgataaaatttgactaactaaacttaagataagcatagttacgcattagagtattaactctcaaacttttaaaaaagaattcttcctttgcttgttaattttctttctttcttttttttttttttgagatagggtcttgctgtcgtccaggccgaagtgcagtgacgtcatcatagttcactgcagcctctacctccccggctcaagtaatcctcctgcctcagccttctgagtatctgggactacaggcatgagccaccatgcccagccttttcttttcttttctttcttttctttctctctctgtctctctttctttcttttttcctccctttcttctttttttttgatggagtcttgcactatcgccaggctggaatgcagtggtgcgatcttggctcactgcaacctccgcctccgggttcaagcaattctcctgcctcagcctcctgagtagctgagactacaggtgtgtgccaccacgccagctaatttttttatttttctagagacggggttttaccatgttggccaggatggtcttgatctcctgacctcattctccacctgcctaggcctcccgaagtgctgggattacaggcatgagccaccgtacctggccctttctttctttttatcaagacaacaacatgtctttatagtgctcccaaggctaaagtataccttacgtctatgtaaacactcaacctgagctttgcaatggcccatgttggcagtagtgcaaacaaaaacaattatgaaacccattttcctttgacaaagagaaataagtggcaagaattggttctttctcttagtatgggtctctgaaaagaaccagatcagtcaaaaggggaatatttttctgaagggataggtttggcctagtggcttctacctcttttagatgactgctgtttctcgttttaatgttaaatagacactaataggagaaatcacattaattcagtcaacaaacatttactgagcacttcctgtagtcaggccctctgttaacttctgggaatacaatgacaactctgacaatcccaacccaaggagccaacaagtccgggaatagagacagacaagaaaacagacaattacaactctaccgttagaataaaggtacattgagaacttgcaacaaatattcctcatcccttatcttaattattcataacatgtttaccaccaataagaatagcaataacaataaatgcccaactcagacagcaatgtccatttaccctgtgtttacacagcataatacaagcaagctgtggacagagattctcttgtttagtcctcacaactctgcaaggtgggttttattactctccatttctagataaaggatctcacctaatattacatgggccagtggtcttccagttggggtatgcacaaccctaggggtaggtgaggaccctgcctggggtcttcaggtggggaccatcaacctccatttgtactcttttctgaacattggtctgagacagaaagtccctgcaattaaggcattaagctggctctttttctatttctcatttcataattgcccttctcctgctttaccaaaatctttcaccccccatcatatatatatatccccatacatattctatatatacataccctacatatgcatgcacacacatcatatatatgtatgcatatatgatatatacatatatgctatgtaaacatatatagtgtgtatatacatgtgtgtatgtgtatatgtgtgtatatgtgtatatatacacgtgtgtgtgtacatatatacatcatatatgtgtgtctatatatgtatatatgggtgtgtctatatatgtgtatatgtacgcaaatacgtatatgtgatgtatatatataagatgtgtgtgtgtatatatatgtgtttgcatgtgtgtgtgtatatatatatagtatatacatattttttgagacagcatctcactctgtcgcccaggctgaagttcggtggctgatgacagctcactgcagcctcccggctcaagtgattcttccacctcagcttcctgaatggctgggactagaggcgtgtgtcaccacacccagttagttattttatttttcgtagagatggtggtctcactgtattgcccaggctggtctcgaactcctgggctcaagcgcttttccacctcgacttcccaaattgctgggattacaggtgtgagccactgcaccggcccatcctttattttaatattatgcagtgccctgagacatataaaaaacccaccttcccaagtaaaggaaattcaagctgatgcctgcagagccttctttaacaaaggctctgaaataccctctctcattaaaatgatactttccaataaaattttgtttaacaatgatttacaaaatgataaaatttatttattttgattgtgtatggatcatggtaacaataaaaagacttgtaaaaataactaaattgaaagaatcttgaacatttagagccttaagactgtaggaattgaagaccacagaattattaatttatattaatatttttgttgcagagacataatgaatgatcaacgaaaggcttttaagcgttaaaaatatattacactagataaaattatttgcgggaatgggatggaaatacattttcaagagagaaaggagcaatgtaaaatgaagatgtaaaatccttctgctggttgtccttggggttttcttttaaagaaaagcttggcagtgtttttctttttttccattggatgatggtgaatatcaaatcactttggtgctaatatttcatttaatacattaattttaaaattttctgtagaggtgggatctcactatgttgtccaggctggtttcaaactcctggcctcaagcaatctccctgcctcagcctcccacagtgctgggattacaggtgtgagccactgcatccggccccatttaatacatttaaaagagtggtgtaacaatttttatttaaaatgtcatatttacaatattctagaatgtatatcttttcaactcattaaacctaaacatccttgtaaaaagtgtgaaaagttatatagtttttcaaaattcgattagcagttacataagcataaatgtttaaagtatgtatggtacagccaggcttcagttccctgtcttaaacacaaagatccatatcaattccagatactgcaatggtttgctgtttttcctgcttcccccatctccaaataaactaaagcatcaacatgcctcacctcacataaccctaagttttcagcagttggcagttacacctggaaaccatttttctaaaataaacaacaactgtttgcttacggatcaaaatgcaaaggaccataacatttagcctcaccttcctactacagatcgagtttaaaagtgccatggtatagctaaattatgaagaaagatatgaatataactgcaaaagtggaaggagatttgggataattcttgcccattttgttaggccaaatgcatctttgtgcaaattagaaaaaggtggtcttcatcccttcactcctatccttttgggggtggaggggcagtggctaaagtacagactaggtttcagctaccacatcctccttcagttagctgccctcggcgtgacagaaacatgtgcaaacagccctgtgcctttgtcttatgttccagccagccaagaaaaatagttgtaaaagagcagctgctgtttggggtaatgaccttggaccctccccaatttgttccaagcctgtttttgtattcatttttcccacatttatgttcctggatggaagcttccatatctgctcttggccctatttgaaattccccagatttccttcctggctcctggcctttggtttttcatgtggctcctgatcccacacgctccctgaatttggattctcctgtcatttcaggtgcgaggtttcccactacagcctcttgggcctcacctccaatacctctttcccatcagaacagcccggaccttcccctatggtagagcagagacagaatttaaatgaattctcaagaagtgcttggactcatatctagcaaaattacatggcatttaacctttgacacaaaaaatgcagcttctaggaatctatctaaagatacactgtggcaaatatacaaaaagaagcattatttatcaagcactatttcctaataaaataattcttaggtcaggcgcaatggctcaggcctgtaatcccagcaccctgggaggctgaggaaggcagatggcttgagctctggagttcaggaccagcgtgggtaacatgacaaaaccccatctctaacaaaaatacaaaaattagccgggcatggtggcatgcacctgtagtcccagctactcgagaggctgaggtgggaggatcgcttgagcctgggaggcacaggttgcagtgagccaagatcgcaccactgcactccagcctgggtgacagagtgagaccctgtcaaagaaagagagagagagagagaaaggaaagaaaggaagaaaggaagaaagagaaaggaaagagaaagaaagagaaaaagaaagaaagaaggaaagaaagaaagaaaaaagaaagaaaaagaaagagaaaggagaaaaagaattcttactaataaatgcaggagaaatgatagaattgaaatatcaccattttcaattcctaatgaaataacgtatctaggcaatgaccatcaatagctagatgctaaaatcatctgatcaaacactgatgggaacttcgtaacagatggatcaggctaacaacatctgaaaccactaactggttttgatgtcataaaaagaaaaacaaccagatattttctgtctcctgatgagttgcaattggagctacatatcacctgtaaagtcttctggccaaaaaattaagcccagccggaccttattaaacctttaaatctaacaattagttttgaagcttttacagattaaatgaagtctgagatttgcttcaaaatgaaccagtggtggggaggaagtgggtgaggtgtaggtgaaacaagattggccacgtcgataattgctggagctgggcgatgaaagcacaggtatttatcacaccatctctctacttttgtgtgtttttttgtttgtttttggttttggttttaaggagcagagagtctaataggcaagaaagaaaagagaaggctgaaggaagacgctcccccgtacagagacagagggagggggctccaaagccgaaagaggaggtcctcttgtgtatgttttaaaatactcccagataaaatatttttggaagagtacttggttggattcaacagcttttttttaatttaaaaaaatcacctcaatttttttgcttgctctaacgtgccatagaaattcctgaggttttacttgttgctttacaatgaactgtgtaaacacaagctggaagagatcagctatgcgctggaagggttggttaaatattgagactgccttgctgagggaagccttttaatgaatctcagtaattttgcaagagaaaagataacaatgaacactacattaaacatcattcttttgcactttgctaaatatgtgtatgtaaattactgtctgactgttactggatatatacagcatatacatatgcactttttttactgtttttttttttttttttttttttttttttttacagagcttgctctgtcacctaggctggagggcagtggcgcagtctcagctcactgcaatctccgcctcccaggttcaagcgattctcctgtctcagcctccaaagtagctgggactacaggcgcctgccaccgctcctggctaatttttgtatttttagtagagacagggtttcactatgttgtccaggctggtctcgaactcctgacctcgtgatccatctgcctcggcctcccaaagtgctgggattacaggcataagccaccgcgcccggcccatgtatactatttatacatttttagtatcattttgtctttacattttacataatttcagatacattttcctcatatcaaataattcagcattttttagtactaacatcatagtctgtaagccattcaaaaaatgtatttcacaaaataggctatctcatcctttgagctattgagatgaattaatttatactcctcctaagatccctctcgtcactaagattcttttattttatgacaaaaccatagttctagaagcttgtttctcccacctgaaaagactggatttgggacatgatcctgtagaacttcggaggtaagcctggtgaatcagatcatagggggtctggagggtgaaaaaaaagagtttggtgctcatggatggggctagtattggggtgtaggggagattaggtcaaagcaagaggattcaaaggagaaatgaattcctttagattggggaagataatcggaagaggtagaagacaccgtccatgacacttcctggggaagcagatgtatgtataaggatgtgagtattgtggttttgtaaagaatgcattcctgaagatgttgcataatttaaaacctacatattttgattaattttctcatgagaatagcagggtatgtgttctcggcgctcacaaatgtataatccattgtggcaaatttttgctttcacatatttttttttatcattattgtcacaggttctgtgacggagttctggtttctaaattcacagcataccaaggcagttctttaaagttcttgatactcttttatcatatctaacttgtattccaaaattattgagttggagcacattttcccagcacttagcaccgctatttcatggatggttggagagggggtccaaaaattttacaatcatgttaacaaaagtgacacagcaacaaaacaataagcaaaatcactgccagagtattccttagcttgaaacaatacggttcacatcgatagaatatggcatctatttctgtttaatcagttaaccctgctaagtagcaagagcttacaattcatgtctaaaatcatgatttttttactagttttttaaaaaatgtgggctctatatatataatttaacattttgcttgtaagacttaattttgcctgggtatggtggctcatgcctgtaatcctagcacttcaggaggttgaggcaggaggactgcttgagcccaggagttcaagaccagcctgggcaacacagtgggaccccatcactaccaaaaaaaaaaaaaaattagtcaggcatggtggtgtgcacttgtagtcccagctacttgggaggctgaggtgggaggatcacttgagcccaggaggtcactgctgcagtgagccattattgtaccacaacactccagcctgggtaatagagtgagactctgtctcaaaaaaaaaaaaagactatttctaaatgtgtggctatattataccatataaatgtggcttcttgggcaaggaaagaggacaatatagatgaaaaagaaattgatcctaccagaagtgatccttttatctgcataactctcaggcagttgtggcaaataattggcaatatctattgttctgaaactggttttcgcaacttttattgggaacaccatcccctctcctgcatgatcagtttctcctctccacggatcattcacatgagtaaagtcagtagcgtgctggtaaatgtttaagatcttgttctttgggggaaaaagttcctaagttctagcagttgccctggataacttcaaggtatcaacatggaagttatgtacaaaaatggctgtcacaagccagtatgagctaacaccaacatactacccagtgttcttcaaacttcagctcacagcccattagtggggcttgcaaacattttagtggactataagcagcatttttttaaaatgaaaaagtagattgttttacacataacaggagtattgttttgtacaatttttttttttttttttttttttttttagacacagtttcactctgttgcccaggctggagtacagtggtacaatctcagctcactgcaacctcggccttctgggttcaagcgattctcatgcctcagcctcccgagtagctgaaattacaggcatgcgccacaaggcccagctaattattgtatttttagtagaaacagggtttcaccatattggccaggctggtctcaaactcctgacctcaagtgatccacctgcctcggcttcccaaagtgctgggattacaggagtgagccaacgtgcctggtcaaaatttttgttttcgtaattttaagtatgtgtgtagtaagtctcaatggaaatgtaattcttatggcaggtcacttgaaaaaaaagaagtctaaaagtcaccaatgtagtatcttctctttaaaaaaaaaaaaaaaacaacaggagaaaacctgaatctgccctttgctccactccttcctcagctataatgctgcttctccattcctcctcacagcaaacctttctgaaatctttatagtcatggtttccaccagttcttcacctcccatttctcaacacacttcagagtcagagtcagcaatgacatccatgttcctaagcccattgcttacttccgtcctccttggcctctcagcacacttggcacacaggctgtttctctttctttggcatctgtgacaccactctcagcaaattcccctggttgtcccttctcagtctcatttattggcgttgtcttatctccccagggctgtccgaggtgattttctcccactactctcctaggtggtgccatccaatctcatgatgtcatatcattcttccctcatgcttcagccatactggttggtggcctttgtttcctgaacacatttaatgcattctcaagaccctcagggactttgcagcagctgctcgctaaggctggaatgctcttccccaccatcttcatatggctgtttcctttctttcactcaccagcagcttaaactttgactcctctgagagactttccttgtcacccaactaaggttgccactcaggtgctcccaatttaatcttctctaaaacacatcactgtatgtgtcctcaactagagtataagcttcctcgaaacaagaacaatcaaaactccttgccctcatggagtttatagtcttatgatgggtgaagtaacataaaataaaaaggcaccttatatagtatattagcatgacaaatgttagccagaaataaagcaaggaagagttgctagggagtgtgtatgagtgtgttttgggagagtgtttgcaattttaaatattggtggtcaggaagggccccactgagaactgacatttgagtagacttgaaaagggaaaaggaaatattgagtaaagattttaggatgggagtgtgacaggcctgctaggagaatagcaaagtcgctgtggctgctgcagaaaaagtgagaaggaaagtagtaggagatgaaatcacagtgtgtgaggattcgggcagatcaggaagtgctcgtgtaagaactggatctttactcaaagaatgagcaaaaattagtagacggttggccggatgcagtggctcacacctgcaatcccaggttacaggaggccgaggcgggcggatcacttgaggtcaggagttcaagactagcctgggcaacatggtgaaacctcatctctactaaaaatacaaaacttagctgggcatggtggcgcgcacctgtagtcccagctactcaggaggctgaggcacatgaatcacttgaacacggtaggcagaggctgcagtgagctgagaatgtaacactgtactccactccaacctgggcaacagagtgagactgcctcaaaaaaaaaaaaaagtaggttttagtaagggattaacatgatctgaattatgttttgtcatgacttctctggctgttgtgttgagactacattgcagaggggcaagggcaaatatagggagaccgattaggatactgcagtaataatgtaagagatgtgggactctatctagaagggcccatgaggtcctttgcatgctagtattctttactgctgtgcctggccatgataggcattcagtgaatatttgcttatttaaaataacacactgggctaattgaacaacagtgccaaatgagggagatatttctaggaataagttcttaggatttatgaacattttaatccagattttctttgttaactctgctctctggccctttcactcagccccgtttgcacctaaatatgacttacaaaagaaacacagcatttatgtgtacttatttcaacttattttagctttgtaaagaagtacaaggttgactcagggcccagcttggtgtctcatgcctgtaatttcagcattgtgggaggccaaggcaggaagatattgtgagcccaggagtttgagaccagcctgggcaacacagtggaccctgtctctacaaaaaaaaatttttaaattagctgggcatagtggtgtgcgtctatagtcccagctactcctggggctgaggtgggaggatcacttgagggaaaccctgtctcaaagtggcggggctggggggagactcaggcagaattgtgaagatattcaattgctcctgactttatcaataatctaacatttcaacctaacattgatatctattttatgcaaagcattacactatgcactggagactgtataagacaagttccttttctcaaactacagtcgagttggatagataaaacacacaacacataccaaaagacagctataaatccaaggcagtgtatgtcaagggtaaattcacctattcagattggatcttgagaagtgcatcaggcttggaaaatgggtaaggaggagagaaaagcaacagtgaatcagaacatgagttcccagttatgggacttgtaatgaattcctcaattaaaacaaaaaataatgaaaacaaaagccagggaggagaaagcccacgttaatgacactaaaatatatctttccaaacaaatgtggataaaagccaagtagagaagatgagaactttgaggtccctaacacaaaataaacagtaagcagccagccattccaagtggctgacatgactttgtttaactttatttgtatttctggctggtgtgtttacagccaataggtcaaactatcagtcagtgtagggccctgagaagtcgggtatttaagagcatctaataggcacagaattgtgctccatactgcttaaactgttccctaagtgtccaatttggagaaaacacccacacgcaggataaccggcgagtgacgcggagtggctgcgagtccaagttatcactaacggatggggagcttgggctgggcacagtccagcgtactgaacccttcccccaccgtttcacctgcatacagaggtgtgtactgtcaaaaagcagcgcctccaagtctcttctggcactgtctggacttggatccgaggcagacgaggaagctgagaaaaccctggcgttgaccccgtggacctgggcgccccgggaaggccagcgcttggtccaggcaggcggggcctgtgcggtgaccaccctggtcctgaaaagtcccagccccgagcgccctccctcctagacctggaggcctggaacagccaggtggacgtcggcccacctttcttttctttccttcccattttcctaccacctcccaccccactccgccttccgggcaaaggcagccagatccacccaggacacattctttgtccttatccctctgtgctcgtcccacagcaagccagtcgcggtccaaggctccagaggctgtgcaggaggccgagctgggtggcgatcagcggcgggtccctgtccaaaacccagcagagccgccagggacgccccagacacagaaggcggggcgcggggagggtggggagaccacagcagtgaggcgcgcgagccgggaagtgaacgaggactgactcctgtcgcttcccgtagccgcccacggacgccagagccgggaaccctgacggcacttagctgctgacaaacaacctgctccgtggagcgcctgaaacaccagtctttgggtgagtcgcgcgacccccggcctcgggtggcggggcagtcgctagaggcgtggctgctctgagggtctcgccagtggaggatggcattcggatgtcacggctcctaaatcaccatttgatgggtgggacagtgtccagtccaccccgacccgccggtcctcaccgcggcagagccggggctgggtggcggggacgctgcctctgcaggcgaggcgctccggggcataagggattatcaggagtcgcggcctttcttggacatccctggctggggtcaggctgtttgccctggggtgtctcctcgctgcaaacccaccccacctgggctgctttctcacctgttccctcctagcctgaggccgagcgccacctccaagtggaggaatctggggaagtttccttcccggaatttgtagtgacagtggagtgacctccattgcgttccctgcctctaacacgctctttaggatgccgagtcatttgactgcagtgttaaacattgcaaagcgcaagtcatgtgacttcctttgaccgtacgtgaaacttaagtgatggctgcttgtgatgcatacgaagtgttcatgctggcgggacctgtccctggggatacttcgggggttgcgtgatttaatgcaagcagatggcttaaattgggtcactggcttgttattatacatgtgtatggcaactcggcatccattctttttgctcttgttcttacttcctgaattgagtcacggagccagagttttgaggttttgactaacgaattaagttaatgacatggggctatatttaggtggtaaaccaagaggtatacagttttttttcttaataaagaaaaagtgatagatttgatcggtgtgtattgttggtgtgcagtataatgacagaattgctggaagtaaaatacaggaagctctggtttcatttcccctttagttctgcttaaagtcgagtttttcctggagctattaaatgtagtgtagtgtccatgagtgcttttatcttaaaaaatgtggctgatgctttccaacactcccctgccctgtgattattatttttttaagcaacagagaaaaccgtatcttaatagtattaaaagtattggatttttccctactttgatttgtttaaattggaggaggaagagcaattctttctattcacaataataatagctaacatagcgcttactctttcgctgttttattaactcaatcctcagaacaaaccaatgatgtgaatactgtaattctcattttatggaaatgaaaatctaaatgaatacctctggtaattgtacgggactgtttgattagtatttaccattaattaattaaattttttttttttttgagatggagtctcgttctgttgcccaggctggagtgcagtggcacaatctcggctcacttcaacctccgtctcccaggttcaagcaattctcctgtctcagcctcctgagtagctgggactacaggtgcatgccactacgtctggctaatttttgtatttttagtagggatgggatttcaccatattggtcaggctggtctctaactcctgaacctcaggtgatccacccgccttggcctcccaaagtgctgggattacaggtgtgagccaccatgcctggcctattttagtatttttaataataaattccatgttagaaattttctactgatgtattttttaagtcaatatttcctacactcacaatccaaaattatttagtatatgagcacactggtaagaatgggaggcagatcgttgattgtaataatattctattatttggtaaatatcagtaacataatatataatttaaattttaaaataggatatgaagaaaaatgctacatgcttacttttcttttcctctatttttactttacacagggccagtgcctcagtttcaatccaggtaacctttaaatgaaacttgcctaaaatcttaggtcatacacagaagagactccaatcgacaagaagctggaaaagaatgatgttgtccttaaacaacctacagaatatcatctataacccggtaactgatttctataagataactttttacctatgccaggacagatccaatagaatattaattatccattgggagacagggcaagaataaaagccagtgaacatatttaaagcacctactatgtaatagagatggtggtgggtgctgattacaaaacagctcttgtcctctagtggaggaagaagtcacaatgataatatgacgtgatgaaacagtgttatgaacagggaacgtctgggtagagtggagggaatgccaacttttggtgatgggaggaggctcagctaatcataaattgtagtttttaaaggaaaatggatttcttactctacaagtttttcattttcttttttaattagagctgtccatgagaagttaatgtctcgatctttccctcagcctttcaaatactgcttggcccttgagcagggaaaatgtcaaaagccaatggggagatggagagtgtgaagtagtaagggtctcgtgcagttcaggcaggtcctagaatccctgaatgactgtaattgctggaaattgccctgtaatcctgagcagtaaagagcttgttttagttttatgtggtggtgagaatctttaggaatgtctagtttccacgtatctgaagctgaatcctgaatcgaggtctgaaaaaggacagccacttttttagtaaaccgcctagaagattcttgggcaaaaggaagggtgagaatccttaaaatgaggccctaaaccagttttgttagtgtgtgtgggttcaagtttttgtcatttactttatagctgtatttcctttttccctaagttttaatgtcattgtgtaagaatgaggtatcgctgctgtatcaagcaaagtcagttttaggagaaatagcctttcagtggtagtaagtttaaaaaagatgacttcctgaagcggaagcttgtgagacatttaagatgactttgcgcatgttagagttaaaaacatcccaaggttgtaaactgatttcctgcaaagatcttaacaacaacaacaacaacaaactaggctgcctgccacgggtgtctgaagtatcatcttggctcaagctgggagaatggataaaggttacactgttcatttctgcccttcacacagaaaagaagataattttataggtaaaattcgtgcatatcttgattctagcatactgctgattcctgtagtttctggggtcagtactctcaactattgaggtggaacaaaaataagtagacttcatttcttgaggaaggggatctggagaagtagttctgcgctagagcagaaaatgccttcagtcttgtggcatgggctggatgctgttctgaggataatgcatttccaagggagatatttttggcaaatagcttttttttctttcttttcaaaattctctgttttattatcagttctcacaaaagagtcggaaaggttagaggtagactgaactgaatggcaaaaacattttgcgctctctttacgtttcactgctgtaaaatatttatagtataaagggcctgtattgcactgaatttctctcatttgtagctagttgccctttcaatgttccaaaaaaaaaggctgtaaataacttattttatttattcaattaattttttttttttaattttttgagatatagtttccctctggtcacccaggctggagtgaaatgatgcaatctcggcttactgcaatttctgcctcccgggttcaagcaattctagtgcctcagcctcctgagtagctgggactgcaggcacgtgctaccatgcccggctaatttttgtgtttttagtagatatggggtttcacagtgttggccagcctagtctcaaactcctgacctcaggtgatgtgcccaccttgacctccaaaagtgctgggattacaggcgtgaggcaccatgcctggccaacttagttatttaaagataatcaattagtatattttataagctagacttaggaaaacggttttcagctgggcatggtggctcacacctgtaatcccagcactttgggaggccgaggcaggtggatcacgaggtcaggagttcaagaccagcctggccaagatggcgaaactccgtctctacttaaaaatacaaaaattagccaggcgtgatggcagcctcctgtaatcccagctactcgggaggctgaggcaagagaatcacttgaacctgggaggcggaggttgcagtgagccgagatggtgccactgcactccagcctgggtgacagagcgagactccatctcaaaaaaaaaaaccccccccacacacaaaacctgttttcttgaatcatggttgttttgttactgataggttcaataagtaaatatatttattgtctgttgtattctttattaggcattataaacacaccgccactttttaatttttatttcattaatgtttccaattttttttttttttttttttaagacagaggctcgctctgtcacccaggctggagtggagtggtgcagtcttaccccactgcaacctccacctcctgggctcagccttgtaaatagctgggactacaggcatgcaccaccatgcctggctaatttttgtattttttttggtaaagacagagttttgccatgtttctcagtctggtcaagcactcctcccgcctcggcctcccaaagtgttgggattacaggcatgagccaccatgcctggcctatttctaatattttggtccacattggtgttagaccaactgtccacattaagttttcttggaaaagatgaagtaaatattgcaactggcctatgtatttttttccctatttagtatatttctttgactagttcaactgatagaattccaagacttaaaaaagtcaggctctaaggctgggtccagaggctcatgcctgtaattccagcactgtgggaggccaaggctagtggatcacttgagcccaggagttcaagaccagcttgagcaacatagtgagaccttgtctctctataaaaatacaaaaattaactggggattgtggcgcatgtctgtagtcccagctatgaggaagagtgaggtgggaggattgcttgagcccaggaggttgaggctgcagtgagctgtgagtttgacactgtgcttcattctgggtgacagagcaagaaccatgttcaaaaataaaaataaaaagtcagagtccgggtgctgcggctcatgcctgtaatcccagcactttgggaagccgaggcgagaggatcacttgaggtcaggagttcgagaccagcctgactaacacagtgaaaccccgtctctactaaaaatacaaaaattagccgggcatggtggcggtggcctgtaatcccagctacatgggaggttgaggcaggagaatcacttgaacccgggaggtggaggttgtaatgagccaagattgcacaactgcactgcatcctgggcgacagagtgatacttcatctcaaaaaaaaaaaaagaaaaaaaaagttaggcttccttttctgtttttttttttttttctttcttctctttttttttttttttttaagagatggaggcttgctctattgcccatgctggagtgcagtggtgcaatctcggctcactgccacctttgcctcctgggttctagcaattctcctgcctcagcctcccgagtagctgggactacaggcgcacaccgccacgccccgctaattgttcttttgtattttagtagagacggggtttcaccatgttggccagcctggtctcgaactcctgagctcaggcaatccgcccgcctcggcctcccaaagtgctaggattataggcgtgaaccaccgtggctggccacttacttttctttctattgaatttgaatgaataatttggaagacagtatctttacttcataccaggaatgctgccagtgaaatttcttgtttggcagttcattatctacctatatatttaattttgctattgtttatagagttcttaagatatgattaaatgctagctggttaagaaatcatttagaaatgaaacagaattggttgttactccaagttaataagttgcttgtcaacataaatcctacctggtacccagttttcttaggaaccttgcttccatgtttatccttttctgcttagtattctaagtactccttttttaccttacaatttagtcttaaaacacaacacagtcaagtctttcttttgtaacttgtgagataccttctagcctttgtgctgtttttcttctctttttgctgcctgccttcctgactgagagtggatttcctcactaaggctctgccctctgatttttcactctcttttcttttttggttttactagtgaaattttgtctttaatgtctctttcttttatgtctttaccgatcactcatagatttttttttccatatgtatccagttccaacctttcacctaatgtgaacccccaactctcagttgctcagccagcccttcaagactaggagttcaaaaccaaacttgcatcttccttcccaaaccagctttcctcttgcagttttctgcagcaggatccttctgctgtttaacttttgcctcctcccttgtttcctagcacccaatagttggaagatagtctgtcttcaaaattttaaactacatttatgtccaaaccagtggcttttccttttaaaaaaatttaaagataatatgtgcaaatcatttttttaaaattcaaacagtatttaagagtttcagtgaaacatgcattttccttctaccctggtacttagttttactccccaagggcaatcactttttactggtttttaaaaatatatccttcctgagatacttatgaatatccaaaagtgtgtgtgttgtgtatatcaccttttatatatcctgtctctttacgtgcatgcattttaccgtataaactgttttctaccctgctttttctatttgacctattttggaaatgtcattttatttagaacttcctcatttattttaacagctgcataattagcagtaaaacttatgtaagcagtcccttgtgaagggctgtgtctttttgcgattatatctggtgctatagtgtacatccttgtgtgtgcatcttggtgtgcctgtgctacgtatttctgtaggataaatctgtaaaagtggaatcactaggtcagagggtatgatccattttctttacttatttattttatttatttattcatttatttttgagacagagtcttgctctgtcgcccaggctggagtgcagtggcatgatcttggcttactgcaagctccgcctcccgggttcacaccattctcctgcctcagcctccggagtagctgggactacaggcgcccgccacccacgcctggctaatttttttgtatttttagtagagacggggtttcaccatgttagccaggatggtctcgatctcctgacctcgtgatccacccatctcagcctcccaaagtgctgggattacaggcgtgagccaccgcgcccggccccattttattacctttatttgcttggatccttcttagcttcttcaatgttaaagatattgagttttcctcttactgaaatttataaatccattgactcccttgatattattgccctggcctgactgattcttctctctcctttctcttctcaccccatgttgaggtccccaaggtcacacccagttttgatgactcaccagcatagagttgtacttgtgcctatgatttattgcggtgaaaggatatagagcaaaattgcaaacggaaaggcacctggggtgaattccaggggaaatccagtgcaagttccaaggtcgcctcccagtggagtcacataggatgtgcttacatcctccagcaaggagttgtgacaacacttgtgaaatgtggactgccagggaagctcatcagagcctcagtgcctagggtttttactggaggctggtcacataagcaccctcacacatatcaaaaaattctggtcccccagaaggaaagcaggtgtttagcataaccatattatttgcatgaacagttcaggtacaggaaatccccgttaccagttaggttggtgggtgcccttctcaaatcccaagttcccagacaccagccaggggcctgcctcgtaaggaggcctttccaggacagcagtcaggcctgccaatgttaattcttttctgcatacctcctaattttagaaaccaccgagcctttgctgcctgacctgtcctgcttttcgatttctttatctactttgatatctttacaaatgatctttaccctgacttttaaatgtgtgctctggccattcacctagcgtgtggttctgagtctccaagtcttagcagatttgctctcagatgctctgccaacgcttcacaccaagtattacaaactaaactcgtcatcttcctcctgaaacctgtctcccaggccaggcgcggtggctcacacctgtaatcccagtactttgggaggccgaggtgggtggatcacctgaggtcaggagttcgagaccagcctggccaacttggtaaaaccccatctctacgaaaaatacaaaaaaattagccaggcgtggtggcaggcacctgtaatcccagctattcaggaggctgaggcaggagaatcgcttgaacccgggaggcggagattgcagtaagccgagatcacgccattgcactccagcctgggcaacaaaagtgaaactccatctcaagaaaaacaaaaaacaaaaaacctgttttctccccagctttgtcatgtatttagtggccttatgtagacagtttcctttgaaacatctcttggacttctctgctcttccagggccattgccaccgacctggaatgtgtccttatcgtttcacgccaggcttatggcagcagtcagtcacccagatgacctcctgacctctggcttatttcacccccactggactgttgttcctaaacacttctttcgtatgtcactctaaaatctgaccctggctgtacctttctttaactactccctgactgcgtgctgagagaagatgggtcttgtcttttcctgcctctctgcttttgtaaactgccatttctacctgaagtggcaactgaaatcatatcttcttcataaactgtctttggctacctcagttagaattccttatcccattttcctgaagcatttctttgactcttctttactgctcccccacccttttttttttttctttgagactgaattttgcttgttgcccaggctggagtgcaattgcccgatctcggctcattgcaacctccgcctcctgggttcaagtgattctcctgcctcagcctcctgagtagctgggattacagtcatgtgccaccatgcccggctaattttgtatttttagtagagacggggtttctccacgttggtcaggctggtcttcaactcccaacctcaagtgatctgcccaccttcgcctcccaaaatgctgggattacaggtgttagccactgcgcccgacccccattttttttttttaaagatgttgaattggtcagggtttgtagttacaagcaacagaagccaactctttaagcagaaaaggaatttgctaaatgatagtgcagagttctcagaatctctagcaggatgaagaaccaggcttggagaataggtagccacagatacacaagcatactgtaggacggttcccatgaagaggcatctgttgtcaccactggacacagatggtactgtgtctctgctactctaccaatgccactgctgtctctgaccccagatgtagctccctctgaccctggatgcagctccctctgaccctcgatatagctgcccctgaccccggatgtagctgcctttgaccccagatgtagctttctccaaacccagatatagcggctgcccccttgccagagtgaatactgcgtcattgtggcttcttcttgtcactggttcttacttaaaagctgagctggaagttctaatgggcagttttgtcacctgctcttaccttgttgcagtctagatgaggtctaatgttcataagctaggggattttcagatatggaaagggataccaattttcaacagccacatagagtatcacattttcactctatgtttcctgggtgtctgttatgtttcctgggtgtctgactcttaggcttctttcaagctgcagtctgcctaatagagagccttgcatttaatcatcaaaaaggcaaagcaatattaatcagcaagggtgttttggcaaataacagcaaacctgactgtggcgtaagcttgtggtattgtctccagtgtgatcagatctgtattttaattttttaaatgtaaattaataatgatctgtgaatcaccaaagtagcttggagtagcctagaaaacaatgtatgtcctccgttttcacagaagccacatagtcgtgggttaaatgagtcagcggcagggcactgtgtctcatagttaaaaaaaaaaaaaagtattactgaagtaatgcaggatcttttctgaagtagaaggcatgatgaacccagaaaactaaagcagcaagtggccaccgttcttagcatagttgtttctcaaactggaacaacctataaacagttgtgaacaaggtattagaagtgatgggggccgggtgcggtagcttctcccaaagctcattacctcccaaagcaaccccagtactttgggaggatcactttgagcccaggagttccagaccagcccggccaacatggcaaaaccccatctctctaaaactacaaaaaattagctgggcatggtggcacatgcctgtagtcccagctacttggatggctgaggcaggagaatcgcttgaacccgggaggcagaggttgcagtgagctgagatcacgccactgcactctagcctgggggacagagtgagactctgtctcaaaaaaaaaaaaaaaaaaaaaaaagtgatgggaatagattgttttgtctcaaaaagctctttccaacactaaaatgaaacatataattaaaaatatttttctggctatagaaatatcgatgcttattatagacatctgcaaagtatgaaaatatatgaagaaaaaaattaaaatcccatcatcccccatgaaaactattgttatcatttttgtctgatttctttagtgtttctctttttctttttttaatttttaatttttttgagtatgtagtaggtatatctatttatggggtatatggcatattttgatacaggatacagtgtgtattagcaaggttttctttttaatgtttatatttatttagttgagatcatactatatatggctctatagattactttctcacttatattactaacttgtgttattaaatattctgcataaagataattttaagatgaaatttgatgttataaaaacttctcattttattaagagattaacgctatgaaacctgctgctatatattcttggaaccagctgtgacccaaaagatcaatgtagggatgtaggtccttccccattctctacacacaaaatcagatactctgatgtgcagctgtagccccagtctacactgtctgttgtattttttgttttctggtgtcatgtgcctcccaccctgctcctagcaattgccatgacaacaaatagataattggcttccgtaatttctcatcttattgcctaaggcaacagagagcttgtgggctcagcttgcggttcagcagctgctttgttgcctctcctctgtatgtgtgaggcctgccagagcccactttccagacaggtgagagttcattcattcaccatgcagttaccgatcgtctcttgacctgtgtcctggggaggtaaaggtgacgagccagttctgccccatgcagctcacagtctaggcaaagctacatgcaaacaaacagaatccaaagtgctatcatgaaccctctgagaggggctgactcagcagcccagggagcttgaagaaggctccacagaggaggctgtgcctcaaggcgatttcggtttaggagccaccaatttataaccacttttctgtggcccgtcttattttatttcttatttcttgacaatcagaagtaccttgggtaggttttaccatgcacatcgtaatttgagtgagcttagtgtgaggcttaacggtgtgtgggctgtacatcctggtcagatgctctagatggaggcagatggttgtgatgcaggagaggcagccacatagcacaggtccccagccagtggactgggaagacagtgtagtcatctctggggaaggggaatgacaagatctggcagtgtggcaggtcccagaaaaaaagggctgggttctgggcagtgagggtgcaggttgagacctgaatactgggtggagccagctgtcagagtccacgcctgcagactggactggtccacggcaggtggatgccatgtcttgaagacccacaggcacccactcatcctcatgatcatgcagttctctggtttctaacagtgcagtctgggttgcagtctgggagtccagcagagaagagcaggccctggaatcccaggtgtgggggcgtggcttaacgtggagtttccttcagaggcagtgagtgcttgtcattgtctccgtcagcattggctttgggcctagtgtggcctcgaaccttctgttgggatcagcagtggaacagtaggaaaaggaatgagtagacatggcattgcaacaagtctttttttttttttctgttagaattatcatattaagcagaagttttgcttcacaaactctcagccaaatacaaaatactatgaatagtatttaccttgtgtctctttccaaagaactcatagtggtttgcagctattgcagatatcctggccatgaggtatgcagttcctttttttttttttgagacggagccttgctctgtcgcccaggctggagcatagtggcgcgatctcggctcactgcaagctccgcctcccaggttcgtgccattctcctgcctcagcctcccgagtagctgggactacaggcgcccaccaccacacccggctaatttttgtatttttagtagagacggggtttcaccgtgttagccaggatggtctcgatctgctgacctcgtgatcctcccgcctcggcctcccaaagtgctgggattacaggcgtgagccaccgcgcccggccgcagttcctttttctagctgtttgaataggaaagatgacttggaaaatgctggattctgagcagatttatgtgcagccttaaaaagtgtagtttttctctatcaataatgagtgtgggttgtaattgcttagtaagtaattttgtttatgtaaacgtacatttgttaaattttttttcttaggtaatcccgtttgttggcaccattcctgatcagctggatcctggaactttgattgtgatacgtgggcatgttcctagtgacgcagacaggtaaaatcactgtgctaaaggaaggagcatgaataggctgtctttttgtgattgtggaatgataacagagtaaggcgggagagaccatttgatactttgaggcccaattagctttcatcagcagccctggccaaggtgctgaggagattggaatgaatgactaaataaaggttattgggatttatttcattgctgtaagtctgatttcagtataaaaaattagaactatcagctggatgtggtgacttaaacatacttttccagcactttgggaggccaaggcaggaggattgtttgaggccaggagtttgagaccagcctgggcaacatagtgagaccccccatctgtaaaaaaaaaaaaaatttaaaaattaactggcttggtggtgtgcgcctgtagttgtagctactcagggggctgaggtaggaggattccttgagcccaggagtttgaggttgcagtgagctgtgatcgagccactgcactatagcctgggtgacaaaaaaaaaaaagaaaaagaaaaagaattaggtatgtcattaaagaaaggaattgtggtcagatgacagggacagtctagttttagtctgacattcccacagcattacagatctagttcagatggttttactgaatacctgctttggatacaagctgtggtatcattagtgttgggctcagctctgtgtacctaacacctgaagagcagtggtttaagatgtgaaaattaagtctcaaggagacagcccaggccttttcagttaactccttcaagtcgttagagaagtagactccttcgagctcaccactctgttatcttgagggtgaggtaaggtcccctttcccgttttccttggcagccagatttccagccctcacttctgtgctttgggtagctggatgggtgcatgtggtgtttgcggggaaacagagctggacaaaaggcaagtgcttgctgacttctaaggcagtttccagtagccttccctgagcacttcacttccatcttaccagcagagctttagctgcacaggcaggcctagctgcgagggaggctgggaaaggtaggtttttattctgggcagattcagacccagttcaaactcaggggctattttactgaggaagacagaaaagattagacagtcagctctttaggcctcatagtgaatgaatgaggagggattggtcagtcccttgtcactgggcctggagtgtagtgcctgctggtcctttactggtggctttcctttctgagcactcatggggcccctgtgtcttccctcatatagattccaggtggatctgcagaatggcagcagcatgaaacctcgagccgatgtggcctttcatttcaatcctcgtttcaaaagggccggctgcattgtttgcaatactttgataaatgaaaaatggggacgggaagagatcacctatgacacgcctttcaaaagagaaaagtcttttgagatcgtgattatggtgctgaaggacaaattccaggtaggttttggagagggacaggttgagtcctcattagtgagcaggagtgcacaggggtgcttttcacatttgtgagcccagccttatatttcctacacctgagatatagtttgtttggctttgtagtttttctccataaaaggaccaggaaggcacctaaatgtgaggtatggcaccactactctccagccagttgttgccatgcagaaatatggtccactgtgaccagatctttttattagatcctatttctcctagcagggctgagttccgaattgacacagtattatgttcatgatgggagggtaagttataatataaccgccaccacccgaagagctaacaagggcaatcccagcgaagaaatcagaagggttttgtaaattcaagtcttgccacaagacagttccgtaggatcatgagattttagacccagaggagatcctagaaatccttgatgtcagttccatctctggcttcatggagtgtcttgtacctagcgtgtatgtgtacggttgaatttggtcccagaagcttacacctgctggccctctggcctgtggagcttgcccacagtagaggtatgtaccaacgcgagagaagactcgaatgcctctggcgcagatcctttctgatcttcgggatactgctcctgcccgaaagtctttctgaatctcccaaactccattcacctctcccttctctggccttttgagcccgtgtctgtatcattctttttcacagtttttaacagttgtgctttggctttacgtgtttattttgcctccacaatgggattttaagctccctgagtcagagactatattgtatgctgctcgcgttttctgcctataacctaacgtggtacctggcatttgagagggagggaggaggagcctcgtagcgtgccgaggacctgcagaagctactttctcgtcatcttactgtagtctgttgaggtagagactgttcctacttcagaataagaaaaccgaattcaaatatgttgggtaacttgtccatattaatttatttagcaaatacaacagattttgagtgtctgccacatgggtggtctccagggacagtgttgtggggagctcgcaggcagatctttaacctgggttcacaatctccagggcacctgtgcctgggcttccaggcgaccttcgaacccagatgtctcacatgtatgcagaggcgcacacaagcacacgcacatatacttatgactgcctgtttgtctggggagagacagttcctggtgcttaatcaaatcaggaactcaaaagaagtttggaagcactgctagtgttttgggtgctttcggttaccatttggtcatgtgtgtggagacctgtgggaacaggtataaaactggacgcaaggaaacatttaaatttggataataagttaatttattaactgtttttttttggtggcggggggggctctgtcttctgtatctctctaggtggctgtaaatggaaaacatactctgctctatggccacaggatcggcccagagaaaatagacactctgggcatttatggcaaagtgaatattcactcaattggttttagcttcagctcggtgagtgaccttccacagcttggggtcttttatgaggatggtttctgatgagatggtagaaaaaatcttcaaataacacttctattgacataaaaaggacgtatctccctgactgtagtattaattttttggaagtgaactgttcacactagcagaaggctgtttatcagccagggcttcattgtctgtaggatctcaaacctagtgtggttttaataaaacacacacagtttttagctgggtagcagctatttcctttgcatgggcataaaatggagtatttctgtaagacaggttcctaggctgggagtgcctgagtcaaagagcacagtcatgtgttgcataaggacagttcagtcaaagatgaaccacatatacaaccgtggtcccataagattgtcatatactgtatttttaccataccttttctatgtttaggtaagtttatatgcacaaatacttaccatcctgctctggttgcctacagtatttggtacagtgcctgctgtacagattcactggccaggagctataggccacaccctacagcctaggtgtgtagttggcagtaccatctaaggttgttaagtaatattctgtgatgtttgcacgatgacaaaagtcatgtaaggacacatttctcagaacatacccccttcgttaagcaacacatgactgtctttgcattgaaaattttgatagatactaactcgcccttcacaagggtaaaaacagtttgcactctcaacagccatgctcccaccttcttgctgacattacatcttattctctgtaatgtttgccaatctgatggggggcggaaaggaccacagtgtcaagtgtatttttggatcatagttttcaagcatatttttagtaccatttataatttttttatatgtcaatataaaatatttagaaaatattttctactggatgttacaaattaatctttattatcttttctcaggacttacaaagtacccaagcatctagtctggaactgacagagataagtagagaaaatgtaaatattaaatcttttaatgagccactggtttaaaaatgttgttttagctgccatgttaatgaaatggcaagaaggctgggtttttgaaaattatgcttttagaacgcaagtaatcacttgaaaattgagatacatacttgtggtgccaggcacgcagtaagtttttgctgatgattcacctgtcagtttctgtaactgccactcactgttcttatgtaaaaagcactctctcactcttaactgctgaatagtactgttctggggtatttccaaatattgaacatcagccagtgcactggcaaatgaacttccatgtgtatcttcaacccctgggagaataactgcaatttaaaaatgcgctgttattaatggagaaagtgaggtcttaccgactggcacgttcacacctcacagacagaacagaatcttagcattctgggggcaccctggaaaggacaactaagacacgtttgaagttcatgtagtgctgggtgaaggtggtggctcaggcctgtagtcccagcgctttggctgaggtggggggattgcttgagcctaggagtttgagatcagcctgggccacatagggagaaccccatctctacaaaaaattaaaaaattatctgggcatggtggcgcatggctgtgatcccagctttgggtggctgaagtaggcggatgacttgagcccaggaggttgaggctgcagtgagccatgattgagccactgcatcccagtgtggatgacagagtaagaccctgtctcttaaaaaaatttcatatagttctatgaaaaattattaatttatggtggaggataaaggactcagatgaacagggatatcagactctcttctcaacccgtgtagcccttcacaacaccataccattccgtcataaagcaccagctgcctggaggtcacaccagagtggagcaggaacatcccaggctccggccaggctcagctcagcacaaccaagacttcagattataaactataattcttccccttctaacattgttgtgttttgtttcttttccaataggttccaaagtctggcacgccccagcttgtgagtatttttgcctgggttatttcatgtggaatattttataaagttgcatagaaaatgaacagtttaaaccgtggagggcagcttcattcattccattccttactgtagaactgtttccctacagcctagtaatagaggaggagacatttctaaaatcgcacccagaactgtctacaccaagagcaaagattcgactgtcaatcacactttgacttgcaccaaaataccacctatgaactatgtgtcaaaggtttgaagagcaccaaattttcttaactctatataaaaattaagttgtaatgagctgttacgagtaacctgtatccacaatagaggcccaaagcagccccctctgcatttgtgtgccgtccctggacggattcgagagtcaaccaggcctgcctctgagccattcctgtgtatttcctcagcacctccctgcttggctgcttccccttcaggcagaacacagtactgcctcagaccccaggcacagggggccttcctggcgtgtttcactcatacagagggcatcgggtcccaccctgtcactcatttcatcgtctaaaatgtaatcatgtgtgtttgcttcgagccagggacagtgctgctgcaggggacccagctgggaccaaggcagactgtctctcccctcctgggatttacagggtcatggctctgaaacattccgtagtgttctttggacacgagttttccctggagatcgctttctgcaggcctcttggtcctgactgtggcttcttttcagaggctgccattcgctgcaaggttgaacacccccatgggccctggacgaactgtcgtcgttaaaggagaagtgaatgcaaatgccaaaaggtcagtatccttcggtaccagtcacagtgcagatacttccgtgcctgttaccgccttccacccgtgaacggtcctgtgagctggaagaagggctagcgtcagaatcttcatttccaaagtgagatgattcaagcaggaggtggttagattgtgaacagccagtgggcagcagagccgactaaggccgtgttctgacctcggctttttctggccagacaagagagtagcatttttgtccacgaggcctatccttgccttgtagaactccagagcagccccgtaagatcaggcaacatcttttcttttttttttttgagatggagcctcactgtgtcacccaggctggagtgcagtgtcacaatcccagcacaccacaacctccgcttcctgggtgttcaagccattctcctacctcagcctctggagtagctgggattacaggcgcaccaccacgcccagctactttttgaatttttgtatttttagtagagacaggggttcaccatgttggccaggctggtctggaactcctgacctcaagtgatccgcccacttcgccctcccagtgctgggattacaggtgtgagtcaccacgcccagcccaggcaacattttttagggcccctcttgtcatgtgatttagaaaatttctgctttaacaactttttccacagacgtccagccttctgaaagcttgaaattagagctatttcctagaaagtggcatactttcaagaaggaaggaacacgggtagatgatgaaaagagaatacctgcttgagaggatcccaggctcctgcagcctgaagtagtcattcagtttagcgttaaaccttccatttctgtccaaccacatctcagcctcaacgctgattttaaagggttttttttttcgtatttttattttgcaagtaacgaattagtggaatgctgactgggtttaaaatttcaacttcacctgcattcccatgtccatgtggatacgtgtgtttcatagagttagaatcatagttcaagtctggtcactaacattgctgaaattgccactactctgtcctacttggttaattaaggtttttttttttctttctttctcaaaagctttaatgttgacctactagcaggaaaatcaaaggatattgctctacacttgaacccacgcctgaatattaaagcatttgtaagaaattcttttcttcaggagtcctggggagaagaagagagaaatattacctctttcccatttagtcctgggatgtactttgaggtgaggttacagtttttgaaaatgggacagcaataagaatcctgggagcaggggtgggataagtggtccatttaaatcaagtcctaactcagtatgtggaagttgtgtatgttttttgtttacttggagattgtaatttgcccctttttataacgtgggcaatcagtataaatggcaaagccagtagagtgtcaaattatgcacattggaattgacatttgtcatcatattaaaattcctgtgtagccccatattgataggaatttaaccaggaagcttgtctcaggactggagtcacacatttaatcatataagcagacttgaggacgtggagaccctaaaactgcttgcttgcactggccatcatctcccatcagggtagacggtttcaggtggcagtcctttctcctaaggagttagtcttgtttgtatgtattcaaggaaaaatacatcagtcccttggaactaaaaggcatgcagtcctgagtccccagataggtgaatattgtaacacatacctttcccgaaatatgtttctgggatgctgagcagagaatagtctccttgtgatgcggatgccgggtgtttggccagcctcaatcaccagctcaggtgccactgcctcacacagtcacttagggtcattggtttaggttatcattctacagcattttaaactgacacattgtctggaccatgtgggttcttgaggactcatcaaaactcgttactaaaagcatgaatatcaggcggaatagatagcaatgtgacattcatatttatccctaagttccagtctaatgcagtgccctggtatgtggagtgtagacagatgtgggctaatcatggaaggttccctgaagttgtggatattggtttggaattcagaaagctgggaaggatgtggaaggctgaaggttggcttttctagatttagggcatgatttgaacaagtccttagaggtgggaagggcagcacagggttgttagcttggcaagagtcaaggcgcaaagggtgacttggggttcactggagggaaacagaggtgagtgctctagaaggaagttgagccttgtggtgggtgacaggaaaccaatgatgtaacttgtttttgacctatctgggccccaagtttggatctgctatattaatataaaaaaggataataatgatacattcaaataatgctgaaaaatactaagatgaaaatacctccaacttcataattcaaaccataccattaggattaggtgaaccacattccaggcatttttttgcagagacagtgaaagggatggctggctgaaggaatgaatagatgaatgttatatgcttttgaacaatcgtcttttccatttaattttctaattcaggagcagtaattatccttgtgttgatcactgctgacgattttctatactgataggtcctttccgggggcttccatctcttgccttttaaatatgcttgcattgagattatctcaggtctttccattatgccattactttcattttaaatcttcttgctctttcaaatacactttagttgtatctacagttttttaaaaacaatctcattcagtgttgtaatttcatctgtgggctcttcctctggatgaaatccgtgttccagctgttcggcagcatcagatggttgtgagggattctgttgttctgttttcttctaggcaaaggatgtgccttcttttcatttgcagtagtctgctcacccggaagcatgtcatttctttgccacttgcttgtaattcactggctttgcacttgctctgatacagtacaggtaactaattgactccctctgctgccaacttggttttccttctgagctatagcatcaggctgtgtgttttgtgttttcttgagattttgttaaatatatctggggtcccttctacctggttggaactgggattcccaccattcttgtggggatagaatctcaggttacacctatttccccaatcctctgtagccacagaagcttcatcttggccagctgttatcagagtgcaggacttgggctgaaatttcctccccttcctgattttccttgacagtcctttccactgctcctatcaaaagaatggaaaccctcaacttgctgctttgcagattcaggttttgtgcttcattctggcctctcggggtggggccgggttagcagcaaggctgagctgcccctctttcttctgaagccttcatgggggcgaggagcacagggagagctcagtgcagggcctcccagtggccttctcagagtgggtggaaacccagcctggcactggcagcgtggcaccagaagtatgaagtgtaggtgtaaaggtgatgtaaaaggctagtaggttttttggtttttcattgtttgagttttgggcatagatgactgtgaagggcgaacactgccgatggatctgaatttgtagtatgtgcaccacttccaacttacgggatacccagctttgacggctttggacaaacacactgaggccaagatgtgctgagcttatcaggatcaggatcaccaagcagctgtaaaaaccctagcaagtgccttaagctgctgaaatttcatattaattgtctggtttgttcatggtcctagagtttgaggcagaaaagtcagtcaggatccaagtcccttggttccaggctacagctggaaacagcatctcggtgaactaaagcaaccatattaggagtgagttttcctgctttaggagagtccccagcatcggcgaggaggggcagcactctggctttccaggagcaaggggcaggatgcggccgagggagaggggctgtgttgaggaaaggagggccgcaggccctggggatggtgtgaggctccaaacatgtccgagtcacttccctgggtgggatgaggcagacagtgccaccaccagggacactttagttagattagggtcttggaagtcagaaggaagtcagcagcagcaggctggaacttttctatgtataatcaaatggtttactctgacaccgttagcatgtaacaaacacaaaattttaaactaaggggaaccactaatggcatgtatcctttcctttcagatgataatttattgtgatgttagagaattcaaggttgcagtaaatggcgtacacagcctggagtacaaacacagatttaaagagctcagcagtattgacacgctggaaattaatggagacatccacttactggaagtaaggagctggtagcctacctacacagctgctacaaaaaccaaaatacagaatggcttctgtgatactggccttgctgaaacgcatctcactgtcattctattgtttatattgttaaaatgagcttgtgcaccattaggtcctgctgggtgttctcagtccttgccatgaagtatggtggtgtctagcactgaatggggaaactgggggcagcaacacttatagccagttaaagccactctgccctctctcctactttggctgactcttcaagaatgccattcaacaagtatttatggagtacctactataatacagtagctaacatgtattgagcacagattttttttggtaaaactgtgaagagctaggatatatacttggtgaaacaaaccagtatgttccctgttctcttgagcttcgactcttctgtgcgctactgctgcgcactgctttttctacaggcattacatcaactcctaaggggtcctctgggattagttatgcagatattaaatcacccgaagacactaacttacagaagacacaactccttccccagtgatcactgtcataaccagtgctctaccgtatcccatcactgaggactgatgttgactgacatcattttctttatcgtaataaacatgtggctctattagctgcaagctttaccaagtaattggcatgacatctgagcacagaaattaaggcaaaaaaccaaagcaaaacaaatacatggtgctgaaattaacttgatgccaagcccaaggcagctgatttctgtgtatttgaacttagggcaaatcagagtctacacagacgcctacagaaagtttcaggaagaggcaagatgcattcaatttgaaagatatttatgggcaacaaagtaaggtcaggattagacttcaggcattcataaggcaggcactatcagaaagtgtacgccaactaagggacccacaaagcaggcagaggtaatgcagaaatctgttttgttcccatgaaatcaccaatcaaggcctccgttcttctaaagattagtccatcatcattagcaactgagatcaaagcactcttccactttacgtgattaaaatcaaacctgtatcagcaagttaaatggttccatttctgtgatttttctattatttgaggggagttggcagaagttccatgtatatgggatctttacaggtcagatcttgttacaggaaatttcaaaggtttgggagtggggagggaaaaaagctcagtcagtgaggatcattttatcacattagactggggcagaactctgccaggatttaggaatattttcagaacagattttagatattatttctatccatatattgaaaagaataccattgtcaatcttatttttttaaaagtactcagtgtagaaatcgctagcccttaattcttttccagcttttcatattaatgtatgcagagtctcaccaagctcaaagacactggttgggggtggagggtgccacagggaaagctgtagaaggcaagaagactcgagaatcccccagagttatttttctccataaagaccatcagagtgcttaactgagctgttggagactgtgaggcatttaggaaaaaaatagcccactcacatcattccttgtaagtcttaagttcattttcattttacgtggaggaaaaaaatttaaaaagctattagtatttattaatgaattttactgagacatttcttagaaatatgcacttctatactagcaagctctgtctctaaaatgcaagttggccttttgcttgccacatttctgcattaaacttctatattagcttcaaaggcttttaaactcaatgcgaacattctacgggatgttcttagatgcctttaaaaagggggcagatctaattttatttgaaccctcactttccaacttcaccatgacccagtactagagattagggcacttcaaagcattgaaaaaaatctactgatacttactttcttagacaagtagttcttagttaaccaccaatggaactgggttcattctgaatcctggaggagcttcctcgtgccacccagtgtttctgggccctctgtgtgagcagccaggtgtgagctgttttagaagcagcgtgttgccttcatctctcccgtttcccaaaagaacaaaggataaaggtgacagtcacactcctgggttaaaaaaagcattccagaaccacttctctttatgggcacaacaaagaaacgaaggctgaagttcgcctacccaaaatgaaaagtaggctttacagtcaaaagtacttctgttgattgctaaataacttcattttcttgaaatagagcaactttgagtgaaatctgcaacatggataccatgtatgtaagatactgctgtacagaagagttaaggcttacagtgcaaatgaggcgtcagctttgggtgctaaaattaacaagtctaatattattaccatcaatcaggaagagaataataaatgtttaaacaaacacagcagtctgtataaaaataccgtgtatcatttactctttctgcagctctatacgataggcaggagaggcttatgtggcagcacaagccaggtggggattttgtaaagaagtgataaaacatttgtaagtaatccaagtaggtgtattaaggcaccaaaagtaacatggcacccaacacccaaaaataaaaatatgaaatatgagtgtgaactctgagtagagtatgaaacaccacagaaagtcttagaaatagctctggagtggctctcccaggacagtttccagttgctgaatagtcttttggcactgatgttctacttcttcacattcatctaaaaaaaaaaaaaaaaaatcaaaattaaaatctgagtcagtccgcctgcctcggttctcattagtttaattcttaatgccttgcactttccggcaatcattcaatcaaaagagtgaaatgaagcacattaacaaagcaggaggcgccacggaccgcctccctccacaccgctccttccgccttcattccttgcccacaggcttgcactggaagctgaataagaatccccaaaactcaaacttcctagggatgccacccctttagtagctcacacctcccccctccaagagctaagaaacaaaggagaatgtacttttgtagcttagataagcaatgaatcagtaaaggactgatctacttgctccaccacccctcccttaataataacatttactgttatttcctgggcctaagactctatgttccagaactgtcacagctccccatgtcacactcactagcttgtgatctttgtcaaataactgaaatcttttaagcctctagtttcttcctttgtaaaacagagataaaatgttgtggtttttaagtgagataatccaagtaaagcacctaacatggagtagtgaatgaacatcggttgctactaaaagtggacatcctactgcatccttaatgccactaggcatttccatacaatctggggaccaaaacttcaatcatataaatgtatgaggttaattaaaaacactactgtaatctgcttgtatgatcacaaaccaccacaaaagaaaagatcgtgaagattacactgtaaacggactctcaaatgatcaggaggtggtcacttcgcaacttgctccctccacccaactcaaaacaggagctcgagcctgcctgtatttgagactggagctgcctgtatgaggactggatcaactgctagtcacgttatatccaaatctgcattatcattgggcacattttcacagaattttactgaattattccttaattgtttaatggttgggaatagtttgggaattaccttccatcaactctgctaagaaaggaatggattctggtagcaagacaatataattctcctttagtttttcagccagtgctaacacagtaatcaaagcagcaaatcgaacctgaaagggataaaagagcaaagaaataaaaagtagtgttactgtatttattatcttaagagctgtactgacttgagacaagctctaactttttaaacattagttcacatgcgtttattcacttcattatgttcattaagctttcatcttagaataccagtttcaccatttgggagctgtttgtaatatgtgcaaccttataaatagtgttttccaaactgtgtcccaggactgcaaatctttaatgtgaaatgtctttttataatctcttcctttaaaaaaaaccaataaaataaaatgccgcatgcaaactcaagtgtgtcaccagattttacttcattggcgctcgccagcccgccaggctggcaataaagtgcctccagccacctctggcaggtctcctcacccacagcccctgactggtcaccactataattgtatgaggggccaggacagtcgcttgggataaactcccatctcagcactgaataaaaaacattctgtgtcacaatatcctagttttggggctttaaaaacgtctaggtgttcctcacatgccttgtctataataaggaaagcaagcagtagttgggtattgttagcttttgaaacaaaagccctactggtcttctaattttggatattttaattaaagaatatctggacagtacaaagtgaattattaaaaaaccatttgtaactacctagattcaatcaggatttccttgatttgtgcaaagtaaaatattacaataaatttgatactgctacttgtataaaaacctatggtttaaaatgtgggggttcatcataatagtctcattgttagcatatcctaataaagaatttgaactaataaatcctattaataaaattctgctttggtctgttatagccagtaaagttctaatacaatcattagtttgagaaatggtgactcattgctaaaacagtttgaaattcgtaacacttgggtgtcaaattttgacttccactcaacctacccatgttttatttccactgccaccacttactcaacaagatcataagcctagtatctataaacaacagaatgtattgctctaactcaaaagactatagtgtggataaattcaatgcatttctctctggagcacaatgacatttcaatggcacttaaaaaagaaggaattacttcaaatctttgttatttaaaagtatttagaaagtattttagtacttctgcccaacgcaccattggggtggggatagggcattgctattctttacaaatagcctgtaagtaaaaaacaaaattttcttaggcacaaatttctgcctaatacaaaagaccggacctctagtactggatgacaaatagcaatgttcttccctgccagtttactagggggcctacatctgtgaccacctgcaggctgtttaggctatgcagtgaaaagatgcagtttcagtacttgtcacgcagttcctaaccttaggcgaggagtctctcgtctttagcagaatctggtagttcagtggtttccaaagagagtcatccgccatggccaccgaaaactgtgcgatgcatggtatcaggtgctttgtcacccgttcctggaatttctcttctcccccaagcctgttttccagctaggaagagtaagacaaagactttgaacaacaagtctcatttctttcttctgtttgaaaaaatatccaacatacaaatattttactatctttcatgatattagcaggttcaaaaaccaggcattattctaatactctctagggcaaatgtattgccttctagaactcaaatggaatctcataccctttatcatcgcccctttctctccagcagaacatctcagaggagctctttgctccagaggacagccatgctctgacgcgttctcagtgaggcccagttaaaacaaatgaatacattaaccatgacagcttatatcatgtctgtcttttgagcagtttaaaaaataaaaaataaaaaataactcagggccaggcatggtggctcacgcctgtaatcccagcagtttgggaggccaaggtgggtggatcacttgaggtcaggagttcgagaccagcctggccaacatggcaaaacctcatccctactaaaaatacaaaaattagccaggtgtggaggcgggcgcctgtgatcccagctattcgggaggctgaggcacaagaattgcttgaaaccgggaggtggaggttgcagcgagccgagattgcaccactgcactccagcctgggtgacagagcaagaccctgtctcaaaacaacaaaacaaaactcaaattccacaatgaagttatatctttgaaaaaacaattttcaaataaaacatttcattaaaaagaccagaaaaaacaaccttacaaagaaaaatcctagcaagctgtcatttgagcagatctaaaacctgccaagctcgaacagtgatggcttcctcagcaacgaaagatgattctgtttggttacctgatccaccagaggcatcatcaaggcttctgctctctctttacttataaaatgctgggtatcaaaaaggaagattttgtataaacagttcaaaataaactgcaacagcaagcagcacttttcagggtcattttcagagtcaaaaaatgcttcatctgtagacgtgggaagagtaaaaatgaaaaaacactgaacttaaccatttaatctccaatgtttacattgaaatcactattaaaataactaaatcagaagagtctaaaatgatctagaaatcataatcaggacgaaggcagaacacaatggatggtctctcgaagaatgattccttcttttagagttaagattctaacactcactctggcaagttaaattccctcaactgtcaagtgggtcacgtattagcattagagaataaactaatcttaatttttgcgttttaaagttacttccagtaactgacagtaacggccatttactttattctttctcccaagtgaggtgacttataacattcgctcatgatgctaaaacaacacttcactgtctgacaacaatgaagtaaaaaattcaccctccttagcttaggacttaagaacctctaaaatcttgcttccaagcactaggttgtgtcttactggtaccttgtataaggcacacagggcaagggtgacagctgaactgaagcgaccacccacctgttttggagatgttcacctggttcaaggtgtcagcaaaaggcttcactaagtggccggcaaacagagtaaaaagccctttcagcttttcagcaatgcaatctgccaagttgtaaaatgtcaacaacctgtcctttggggcatcttctgttttagcccaatcaaacagctgaaaggataagacagtattagtttcttcgacatcttgtcacttaaatctgagcacaaaagagaggaagaggaagaaagcgtcaccttgaagaacaggggcctgaatgtgacctcggaaagtttgacaaccatggctactagacagtcaatgatacaattttccgtttttccaacttcctccagatcgttctgaaaacagaagagcccatttattagagtgctgatacctgactgtaaattattttggcaagtaccactgttacacggctagattgttctcggactcttcaataggtggataacagctttaggatttggaggagtgaacctgagcttacctcagagtgctgggctcggaagtccagggcttccaggaaaaaggcggttagctgagactgatgggaggtgagctcttccttcttcatcaccccaatatgctcttgcaagatgctcataaacggacccatgtgattctaccaataacacaggaaagagatgtgccattttcaaatgattcctagagttcagcggtgtgtatttttaaaaactaaatcttcttctttaagtcaaagtttacacattgcagtaccacctctcccttctccaaagtcttaatacccaataagatctaaccttccagttcttctcaatctgcttgtaagtttttttgatggcgggcaacaggactcggggtgcaagtgtggtagccagtgtctttttaagagatgtgagacggatattagcctgtgacgcagaacccatttcactagtgattttctccagatgaatcacctacaggaatataaaaaaagtgatcagggccactgcagatcttcgctgacaaacacacacttacagagaggcttcatgatgaggtactagtgtttggaaaatgcttagcactttttaactacacacagaattccttttaaagtcagccctaaacgtcagtggataaaactgggcagacacctcttgcccaacttgcgatcagggacgaaggccgatggtagacgcagacgcacacacagcacccagacagatgattttcttagaggacaggaatgcaagggaccacggcaagagtcaagttgctaaaaaactgagaaagctcctcagagcacaggcccctttctctgagaaggctacttttaaaccctggctgtggtgtaagtgaagcggtttaatcatttgccccatggtaatgaaggctcctaaccttgtaaatggcaaatgatcaacacaatggaacagccaggtctcaacattcttgagcatcttcaatcataaataccactggcccctagcgtgttgacaggaaaccgctgacgtgcaatacaaaaattctgctttgcaagatgccttaggattatacctctcacagtagaaacagggcccatcaatttccacaagtaataaaaggcggctctaccagcccaactccaaagatctcacagaagaaaaaaaagccagaatacattccgcacaattaaagaagagaagcatctcgctaaaaagtgacccccatatcaatttcaagattaagtggcaaggatgatggaagagaaaaagtacacatttaataaaagcaagcacatctcttcagaaataagactcctttctgtcaaacggaaactaacccttaaagaaaaaacaaaatcactacatttgtgatcttttaccttccccagccaccctgcgtagcatgtcgtggctatcgtggctcacctgggagagaatgccttccagataggggctgatgaagtgcgggagagtctccacaaccttctgcagagcagccaaggcactgagcaggtagacctcgctggagaccagctcgctggtgttcttcattgttgtcagcaacgatggcatcaggctagaaacaaagtaagagctttagaagaacttgaagcagaaacagaggctagggaatggagtagagggcattatgaaaaaaaccagcaaactgtgcctattacatcgctatctgcttcatagcctaaaaagcagtgtctatacattttatgtggctaagcacaagaaatctcccagtgctaacagtacggacacaacagtaatttaaaaaataacaatgtctttcattaactgaacacttactatgtgtcaggcactatgcaaaactccttgcaagcactgccctacagaaatcctatgaggtagatactgtctctgttttatagacagcaaagctctaacaggttaaggaacatactggctgtacagtaaggaactaccacagccaggagcttctaacttccaaatttggcagcagaaggcagctttggccttgcctaactgggtgggcccctctgccaagaaccttcacccactgctttttgactatactagacaaaaggaaggaagaatggaggacgattaacactgcaaagtagtgcatctgaagataaacgggaaggctgcatctttctgtttgaagattaattatttttattattatttctttaagagacagggtctcactctgttgcccaggctacagtgcagtggtgcagtcatagctcactgcagcctcaaactcctgggctcaaacgatctccctgccttggcctcccaaagtggtgggatcacagccgtgagccaccacaccctgcaagatcaattctttaacaaattccaattttatgcaacgtctactcagaggaaaaaaaaaaaaagtcaccaaagtgttatttttcaatgtgtgccaggcggtaacagctcctgttccaagtctccggccgcatacctgggaagctgggggatggccagcgcctccagggtggaggtcacctctgctatgcacagcagcgcgcttcccaggacattcttctcctcctttctctctggagcaatcagtttcacagcagtgttcagcactgggacaaaaggatctggattttctgcaccaaaattcttgcataaaagctttaaggtatacaacgctgtctgtctgttgattgcttgttcttcttccccttcctttttcttacgctgcacaatggccaaaaggtctggaaccagttttaggaaacgggtaacctgaaggggacagccagaatccccaaatcattaaagctgcaaaaaatgtttgtccattttcccattgtcacagcttgagattgtctaaatggaaatcagactcgggggtcctgagtcacacagtcatgctaagcgatgtgcatgttctagccagtgtttcacttatacaaagcacccactgatctggagtaaaagggacttagaactatgctaaggctaaggccacgtaagctctgtagtaagcaagaattccactaggctgaaattccattctaagagctcttacaacacacatatattcccgttagaattaacgtcacattttaaaacatgtcatggtattatattcagataataatatacttcaatttgaaattgtaccactagagaaattgaagggagttaaatgcagctctttgataaagcaaagtacagtaaatgggtgtgtcctgggtcttcactcactattgtcttcttccaggatatattttgctgcagcttgttattcaaaaggtccagcgctttgcggcgaacagatggcaggggattgcccaccagccctctgatcacaggaatgaatgtctctgtgggcagcaaggcattgacctaaagagaaattttatatttaacatgaaaagaaaaacaaattaaaaaaaaaaccaacttcaattaagacagactgctgtccactgcacacctccaggcaccaggcacttccacacacattttcttatttaattcttaaaataacctttcaggtaggcattaccaaccacacattatcgaacaaaacaaaagcctgatgtcaggaggaagtgccaaaggcatgcagctaaatgactgagctagatttgaatcagcaatcctaacttcgaggccagtgatatgtatgtaatatacttcatacttttattttattccacttgaataaagtagaacagtatatattatatgacttaattattaaaatatacgaggtacatgttctcataactggtaaggaaacaattttttccagacaaatctatttctagtcatcaagagattgttttctaagaaaaatctgagcttcattatattcataaaaggaattgctaagtttattcttaaaaactttacataatttcacaataatttaaaaaacagcaacaaaacagtaattccagggagaaatgaacacctaccttatctaacaggtcgtaagctttactaaggagcgcgcgccagaacttcacggtgagtttgtctgcgttcctttccatggactgtgcaactgcactgatatagccgagaacggtctccagcaacctgaaacacagaggctcgctcagcaaacggcagctgaaggcactcagagaacttgttcatgtctaccttatgctaaatgtttcaagtagaaagacgagttaaataattctgtactaaattatttcaaaaactactcggaaagaaaggaaatgagggattattgccatagacagagatcatcaagaagtaactaggcgcttctgtgcagaagcatcgacctcgctcagactctgtgaggtgctgaataagcaacagatgctgaaagcgtttaaggaactcactcatatctagctcatgctcagtggatctcactgggctgtccaagtggggtgttcagggagttatggccctaggttaatggcaggtgtgtgcgcgcacacacacacaggcacacacacgcacacatacacatgcacacacaccatacaccatttatataaagagaaatattaatagaaatgaacatataacccacttctttcacattattaggagacaaaaaaaaaagactacaaacttcaaataacttgtaattagaaaagcacacaccaaattccaacacagctgccactggagatccccccactgctgccagcctgaggggggagctagagggaagagtggagacagaagttgacaccgcacagcagaggaggggagaagggggcgcagacaaaatcagctccaaaaacgaaagtcctacgcatagcgctacaagtcagcccacaggactggaactcagcagctcacattcctggctgcagggcaggcactttccagtggaaggggcaggacagtggccctgggaatgccatgcatctgaaaaggaggtacacagcaaggccaggaggcaaaccccgaggacatgggagagaaaggaaaattcctgcacccaaatatataatggcagcatatggattagaatccacagaataaagaattcatgagcccatagaaatcagggccagattaagacactaaacagatactgcaactcaatacaatacacagacttgacatggatcatgatgcagaaacacatgcggtgtaaaggagagtgttgggataattagggagactggagtatgaactgtagattacatcactggattggatcaatgttaaattttctgaatttgatcaatgtactgtggttttataagaacatctcttattcttagagacataatgtatatgatttactttcaaatggctcagagaaaaaaccctacatagggagaacgctaaggcaaatgtggcagaaagtattatcaaatggtgaacctggttgtaaagagtatatgaattttctgtactgtttttccaggttttctataagtttgaagtcatttccaaataaaaagtagaaaaagaaaaggaaacatacctctcttcaaggccttttaaaatctcaggaccaccactctcaactacctaatttttaaagaagacgtcattagaacggtagggaagtcaataataaaagtcatttcaagtcagttcaatgaaactcggaccattcactgaaaccttccacagcaactgttttctgacattacaatttaatcaggttcatatcatcttcattatactgtagtaactctatttctcttaatttattttaattacattctactggtagtatctaaaaagtactacaatggttcagaaaaatacagcaatcaacactcaattagcactaccgaattctatgacatgctgagctggtgagctcacatatcctttgttgagaagttaaacattacagattcagctggaatcccccaagtactgctccttggtcctattctccctctaccccaagccccacaaacaaaaccatcatcccaaatctgcttccaaatgtttcaaacactacatatcacggaacaacatgtttttctggaaacatatttttgagatctatgcatggtgacttatgttctagttccttcattttaactgcatatgatattcctctataaataccacttatctatccatttgcctctgttgttagatgtttagtttatgtccattttttccccttttactaataatgctagagaagaacatttttatgtccctttgatcatcttgggaagtttttacagcatatatacctaaggaagggaatgaccagatcacaggaattactggaactttcaacctcatgggatcctgccaattgctttctaaagtggttggaacaatcacactgtctgccactacgtacccaatccctggtactaacgacttcaacagttttgccaatttgatgggtatcacatttaatcacatttcctgcttactggaggctaaatgacattgtacattaactggccatctgtaattcctcttcagtgaattcatattctttgccagttgttctaatggaaactgaggctttttgatttatgcagagcaataatcttctctcagcctgtggctttctattgaatcaaaattttaaaggaattctttcctatcctccagtcacaatcatgttctccttgattttcttctaaacatttgaactgttgttttttacaatgaagtttttactctgactaaagttgtcttttctacaaggtgtgacatcagacttttccccaaatgggaaacaaatcatgccagggccagcacttggaccattctctcccccaactgctttgtaaaatcacctgctgcacctcttacctatgcctgcatgtgtttctgggcctactgttcagtcacattgatccatctgattactcctgcaccataccactgtccttggccccttacagtttggtatcaatgtatcaatatcatttcttaaaatgatataattgaaaaagcacactgagtttctagaccaatctgggcagatctgccacctttaaatagtgaggcttcttcatgcgtaaacacagtgtctctctttctatttcttccaagttttcttctgtgtcccttcatatcttgcacatttcccctgtaatatttgtgcacatatttttgtcaggcttattcttggtaccttataagtttatgtttgtattatacaggaaatctttttttctactctgttttctaatttgaggaataacaatattatataacagtggtgagactaattagttcagccagcctgcttgatacagatcacaacctacactgatctctagatagtgtctacactgatctctcttaagcaagcttactgaactcattattagttctaattgctgattctcttctttcctgattcttacacttcatttcttttcctgaatagaaacaatgacagaggagattcttgtccctgactgtagcaggcacaccattaatatttcatcattaggtatgatataaaccacaagcttcagattgtcacctttattaggccaaagtaattcccatctatcctgcactgctgagaggagttttttccttttttttattttttttattttttcagacagaatctcgctctgtcacccaggttggtggaatgcattggctcgatcttggctcactgcaagctatgcctcccgggttcacgccattctccttcctcagcctcccgagtagctgggactacaggcgcccgccaccacgcccggctaattttttgtattttttagtagagaccatgttagccaggatggtctcgatctcctgacctcatgatccgcccgcctcggcctcccaaagtgctgggattacaggtgtgagcgaggatttttctctcttaagttgtgaataagcattgagtctgctgaattatttcactgtgaaatgtaaaatgatcatatggtttcccttcttcatctgttaacgcattataggacctaatggactttacagtactctaatgtcaaaccatttttgtattcctggtcgtattcctttctttccttccttttctctcattgtttaaacaagtttaatacacaaacagagatgtatacaaatcatacatgcagaactcactatatccaggtaaagaaaggctgggcatgatggctcatgcctgtaatcccagcactatgggaactcgagttgggaggatcgcttgaggccaggaatttgacatcagcctgggtaatagagcgagaccctgtctctataaaaaaagttttaaaattagccagatgtaggtggcacacgcctgtagtcccagctacttgggaggctgaggcaagaggattgcttgagcccaggagtttcaggttgcagtgagccatgattgctctactgcacttcagcctgggacatggagtgagacctgtctcaaaaaataaaataaaatacaggcaatttatctactctgctggtagacactggagttgttaccagttttgtgctaccatgaagaatgttatgaatattataaagattcttgtagtttttttggtgtacaggttcataaacttctgatgggtacacaacacttaagaatgaaaccactgagtcacagagtttacattatgttccatctcagtagatc

SEQ ID NO: 59102 - DNA, 543 bp, Homo Sapiens
  misc_feature (460)..(460): n is a, c, g, or t
  misc_feature (475)..(475): n is a, c, g, or t
  misc_feature (518)..(518): n is a, c, g, or t
  misc_feature (524)..(524): n is a, c, g, or t
  misc_feature (526)..(526): n is a, c, g, or t
  misc_feature (533)..(533): n is a, c, g, or t
  misc_feature (543)..(543): n is a, c, g, or t
gagacagcgtctcaccttgtcatctaggctggagtgcagtggctccatcatagcctcctgcagccttgatgactgtgctagagccaccctctcactttagcctcctgagtagctgggactacaggtgcttcccactgtgcctggccaattaacaatttcatttttatttttagtagagatgagatctcactatgttgcccaggctggtcctgaactcctgagctcaagagatcctcccaccttggcctcccaaagtactgggattacaaacaagagccactgtgcctgaccaggctctaagattgctaatctggctatagaaggactaatgttggccacctcagagacattcattcattttaagaaacatcatctttcactgaatataatatgacattttttagaaggcacagcatatatgtaccataaagagccatctcaactctgacataaactttgntatcatacagcatgnttattttatgcgaatgaaagaactcttttagatggtttagacnccaatntntcatatnaccccctggn

SEQ ID NO: 59103 - DNA, 522 bp, Homo Sapiens
  misc_feature (52)..(52): n is a, c, g, or t
  misc_feature (101)..(101): n is a, c, g, or t
  misc_feature (131)..(131): n is a, c, g, or t
  misc_feature (189)..(189): n is a, c, g, or t
  misc_feature (201)..(201): n is a, c, g, or t
  misc_feature (292)..(292): n is a, c, g, or t
  misc_feature (313)..(313): n is a, c, g, or t
  misc_feature (398)..(398): n is a, c, g, or t
  misc_feature (421)..(421): n is a, c, g, or t
  misc_feature (446)..(446): n is a, c, g, or t
  misc_feature (472)..(473): n is a, c, g, or t
  misc_feature (514)..(514): n is a, c, g, or t
aatccaaacaccaacttgaacaagagactttcagttttaaaacattttaagngggaaaccctgcctgtcaatgcatcattattgcccttcttgattgctgncttggtagatgattcactgcccctccctanaagaggactatgtgtcatctgcctgccccatgacctcagccttggccacatgacttgnggtaccagtctntacagaagaaggatgcctccttatatgcaaactcaggtgtggccatgtgatctgcactggccaatgaaatgtgggcacaagtgacacctgntatttccaagcataagcttanagcctatgaatggtttgccaggtttgcctttcctccttcacccttcctgggtataggacagaagacaggaaggagcagaactatngcagaccccagttgacacacagnacaagcaagcaataagccttgctgntgcaccctgggggtttgctttacagnntaacctagtttaaaagactgggaccgtctttacatgggatnccccaact

SEQ ID NO: 59104 - DNA, 396 bp, Homo Sapiens
  misc_feature (348)..(348): n is a, c, g, or t
ttttttttttttttttttttttttaaaaaaaagatatatggcattactttggtctccaaaacagttgccagtttgaactttattctgccagcaagtatttggtttggctcaccagggctcaagttgaaaaaatatttgcccattccaaaaagatttaacgagctttgctgcaaatgctggtgccatttggcacatcacagggactgtggcacagcaaaagagaactctctcaaccacagattttatttgcccaaggtagccagcactgggagctcagttgattcctcgggtcaagaagctgcaagtcaaatgcgtgaagtttccaagagaaagtgaccaaagcaggcntgagaaaactcttgctgacattgaaaaggaagtcactgggtctgactc

SEQ ID NO: 59105 - DNA, 2863 bp, Homo Sapiens
gtccgtggccagagctgcagagagacaaggcggcggcggctgctgtgctgggtgcagtgaggaagaggccctcggtggtgcccatggctggccaggatcctgcgctgagcacgagtcacccgttctacgacgtggccagacatggcattctgcaggtggcaggggatgaccgctttggaagacgtgttgtcacgttcagctgctgccggatgccaccctcccacgagctggaccaccagcggctgctggagtatttgaagtacacactggaccaatacgttgagaacgattataccatcgtctatttccactacgggctgaacagccggaacaagccttccctgggctggctccagagcgcatacaaggagttcgataggaagtacaagaagaacttgaaggccctctacgtggtgcaccccaccagcttcatcaaggtcctgtggaacatcttgaagcccctcatcagtcacaagtttgggaagaaagtcatctatttcaactacctgagtgagctccacgaacaccttaaatacgaccagctggtcatccctcccgaagttttgcggtacgatgagaagctccagagcctgcacgagggccggacgccgcctcccaccaagacaccaccgccgcggcccccgctgcccacacagcagtttggcgtcagtctgcaatacctcaaagacaaaaatcaaggcgaactcatcccccctgtgctgaggttcacagtgacgtacctgagagagaaaggcctgcgcaccgagggcctgttccggagatccgccagcgtgcagaccgtccgcgagatccagaggctctacaaccaagggaagcccgtgaactttgacgactacggggacattcacatccctgccgtgatcctgaagaccttcctgcgagagctgccccagccgcttctgaccttccaggcctacgagcagattctcgggatcacctgtgcgtagctgccctggcgcaggggtggggggcttggtcctcagatgctgtcccccagctactggcccagggtcaggctctggggtggccgaggtgacgtgtacccaccctcctcctgttgccatctggcactgcagggcaagagagggggttgttggggctgcccccaccatgcacagccagtccacactgtccaaaggcagaggaggtggggtcggtcagggttgtccaggccggtctctcaggcacagctgggccaggaggcagggtgatggggggctctctagatttggggctcatcatcctggtcaaagtcctgcctgtaaccgctcccaggccccagaccctcagctctctcatctagaaagggctctcggcatttctccccagatcattgtaggatgccaagcatatatcacaggaactgagcagctatagtgtctgatcctacaggcgctttgtgatgggtcaaatgctcagtgtggctgagcacagatgactcgtaaaaaactccgtaacagcatctcaaaacactggtgaatgctaaggaaagtgatgcctcgaaagaaccataaaacccctcaggccttcatctaagtcatcgaacaccgtcttttcaaatgggactacctccagcgccctcctttcttcttggagcactaacagtcgaaggggggagctgattttggtgtgaattctgaagcagctcggttaagatatcgtaaagacaaatcttgaatcttaaaatcaatgtttctaccccactgtgtattcaagaatcacatttgcccaaagggcagcctggcctttgtcctggcccctggggggtgacttctgaaccttgcactttcccaaggggcaggagttacctttgtcactcatcaggggccctgatggtttatggtaactcatggttatggtgtgactcaagataggggtgtaggggtggccattccagaaagaccaattacatggttagagggtgcgggctttgagtgatgtgagaccagcctgacctctggggagggcatggggctggagactgatttcagtctcaaggcgtcctgtcaaggtcgctggaccccaaactcccctcaaaggcaaatttacacccatttactcagcagtgctcctaagcgcctgccaaatgcaacgccctttctgagatggggaaggtctctcctacaccctggaagaccatgaaagatgttgagggctgactgactttggctagtggatgggaagcctgggagagttcagagccaggctgagcctcatggagacaaatttgatcatgcgcataggggtacctatctggtggagacagaaggaggcactacattcagcagcatcctaccagccggggccagagcaggcaagatggacaatgctccatcacctgaatgcgccaggctgtgtcctagagagaagcttccagaagcctcccaacttcattagcccctgcagagggatgatgactccagcctctgtaggttcctgcttgagaaaactcaatgctgccaggcgaacttactgtttgttccagccaaaacctggtgacagggagataggccctggaacccctctttgagcagcagttcctttagaaagcttgcaattgtgggccaggcatggtggctcgcgcctgtaatcccagcactttgggaggctgagttgggtggatcacttgtcataggagttcaggaccagcctggtcaacatggcaaaaccctgtctctactaaaatacaaaaattagccaagcgtggtggtgcacgcctgtggtcccagctactcgggaggctgaggcgggagaatgacttgaacccaggaggcagaggttgtagtgagccgggatcgtgccattgcactgcagcctgggtgacagaacaagactccatctc

SEQ ID NO: 59106 - DNA, 571 bp, Homo Sapiens
  misc_feature (479)..(479): n is a, c, g, or t
  misc_feature (505)..(505): n is a, c, g, or t
  misc_feature (533)..(533): n is a, c, g, or t
  misc_feature (542)..(542): n is a, c, g, or t
  misc_feature (556)..(556): n is a, c, g, or t
  misc_feature (559)..(559): n is a, c, g, or t
  misc_feature (567)..(567): n is a, c, g, or t
gccttgtgattcaccttactctcggccatttcctgagccacgtctgaagaaatcctgtactgccaagatatatcctcagacaaagaaatgtccattagtcactcactaaaagggtaaaaagcaatcgaaatgttttcctatctgaacccctggtgccagcacagtatacagtagacaatatatgccataatttattgcctgaactccccattgatgtgaccatgatatgtcaatggaaagtgagttcataaaaaataaattctcattctcttcaaataaatttattgagattctatgacactcccagaacgtggatatagcaaacaacactatgtaccatccatgaaaaaacttacaatccagtaggagaaaaagacaagtaaacaagcagttattgtagagcataataagaaataaatgaaaactgccatatgggcattttagttggtacagtcaatgccaaatagagagagcagtancagtttcctgaaaaagtgatggctanggtgagacctaaatgccggtaggaattnaactggggnaaatgttggaagcngcncactttanggac

SEQ ID NO: 59107 - DNA, 2308 bp, Homo Sapiens
tttaaaagggacagggtacagttttattggcttagagaaaaaaagcgggggcagggatgaggtgacagtcctcctcacctgaataattgcagctgaggattaaacatatctcttcccaaatactttatcttctaggtatacttctcttacaatttattagaaagctggttacttgagataactaaagagatactaattttcatgcaaacccatcacaatgtattgaaactgagatacttttctgctgctaacatatttaggaaaaatagttttatttttagtaaataaaatctccacttatttcaataaaaatggcaaggagaaaatgtcataagattatcctgccatgtaaaataagctgctccccaaaggactgtgtcaagattggttttaaatagaaaatatctattttaaatatatttagattataattgcctgggggttggcaaactttttctgtaaagggccagatactaaataccttaggctgtacgggccttcagatctctgtcacaactgttcacccgcgcggtgtagtgtgaaggcatccacagacaaaatgtaaacacacaggtgtggctgttctaataaaacctcaccaaacaggcagcacaggccacagtatgctgacctctgcactagcctcatctcaggttaactgtcctctagttattaaaaaagaaacccaaaattaagttacacaaaagtaatttttaaaaactactttggacgttaaaatggggccaaaggtagaatccacggaggtaaaagttcttgacgagcagtcaggaaatctgaatgattctgtcctttgttctgcccataaccagctgtgagctcttgggcaaatcacatattccctctgcgattccattattgcatctctaatctgaaaaagtagaggagggattccatccaattttgttactataaatttcagttcaagcaaacttactcccactgttaccaacaaaagtttcaaaagactcatttaaataatttataacatagttctggttaggcatgatgagctaaaaatgagagttggggtattaaaagcaaacaaaaaaagctgaaatatgaagactatccaaaaaacaacagcatcaaaaaccatgaaatacacagggatacagttaaaggatatataggatctctgcactgaaaaatgtaaaacactgctgagaaaaaatgaagtaaatggaaaaacatgtttatggattggatgactacttgacttatagattcagtgaatcctaataaaaatccacaaggcttcttctgggagtagtttggtggaaattgacaaaatttatttggaaatgcaaaggacctagaataaacaaagcagtttgcagaagaagaaattagaacgtctgttttacctgagatcaagacttaccaagttttgacaaaaagataaacagaatggaacaaaactagagccacagatatatggtcaaatgattttagacagggcaccaaaacagtttaacagtgaaaggagactctttgacaagtggtgctggaaccactgaacgttcagtagaatgttcaaaggtatttgatgcctacctactttatggcatataaaaatactaattcaaggtgaatcacagacctgaatattcgctacaactatcatactcctaagaaaaataagagtatcttcatgagcttgggtaggcaaagacttcttaaagagcacaaagaaagcattaactataaaacaaaaattcataaattggatttcaccaaaactaaacccttcttctcatcaacagatactactgagaacaggcaagctatagagtgggaaaagatatgtgacacataaatctgacaatcctttatgtccagaatgcacaaaggagtcctatccaattaaaaggaaaaaaggacatgaaaagtactgtccattagtcatcagggaaatgcaaactaaaccaccatgagataccgccacatatccagaagcatggctaaaatgcaacaggtggacaataccaattgtcggcaaggatgtaaaaaacaaccagagtacaatgtgctggcaggaacacaaaacagcacaatggttttagaaaactgttgggcagtttcttaaaaagttaaatatacagctaccataaaacctagcaattctactcctagctttttaatccaagagaaatgaaaacatgtccacaaaaatccctgtacaagaatatttatagcacatttataatagccccacagaaacagctcaggggtccatgaacagaaggatagctacataaactgtcatgcattcaaatagcacgacaac

SEQ ID NO: 59108 - DNA, 2304 bp, Homo Sapiens
atttcggagcgagagccgaggccgggggaagttcctgcggagtgctcaagggcagaagaggtgccgcgtcccgaagaggggaagcggagaagtttgctgctgcccgggtcgcctcgcgacgctgagagaatcgcccagccctccgcagccgcccagcgagaaccggagctgcggccccgcaccggcgtgagtccagctgagctgacacgccgagccggttgtgcctttccgagggaggaatgtgccgtggaatccaaactttggaaaacgtcccacccgaattcccagcgagcagcaaggagaccagagcgtcgatggagccaccgttagttgcgggtgggctgtccccaagaggaattcatcactgtcgtccgctgggagggaccaaccttgaaatggggttggtggagagagggatagagaagagccggcgtgcttataaataacaaaacttagctatgaacccttccgattcccaagtggggaagatggggtaaaattctaagtgacttctcgctccgaagagggataccacaaaaagcggagcgcagggtacttggcgtataataagccatcaataatttatgggtgaaattgagagccaaatataagatgataaactgaagaataaaaacagctgacaaatactgtatagaaaagattgcgttggaatcataactgtggattggaagtgatgttaaggattattggattgagtatttgtagctgaatttctgctggcatttctatcagtggggaaagccctcacagctccataggtaatttttgttaggggaggaagaagtgttgttctgtcacccacccccaggcaaagagtcgctgatctagttctccatttctttctttctttcctttctttccttccttccttccttccttccttccttccttccttccttccttccttccctccctccctttcctttcctttcctttcctttctttcctttctttctttgaaacggagtttcgttcttgttgcccgcgctggagtgcagtgcagtgctgtgatctcggctcattgcaacttccacctcccgggttcgagggatcctcctgcctcagcctcccaagtagctgggattacaggcgcacgccaccgcacccgggtaattttgtatttttaatagagacggggtttcaccatgttggccaggctgtttgaactcctgacctcaagtgatccgcccgcctcggcctctcaaagtgctgggattacaggcgtgagccaccaagtcctgcctaatctcctttttatagttgaggaaagctagtaacttgactgaagtctcatatattagagctgtaactgaagtttttaagtgtctcaattctgcaactattcgtttttctatcacatcactgtttggcatatatatagcgggaaaaggaaaggctggaaattagttgaccacacactgattaagcttgaaacatatttctactggagaaaaaaaggtactgtaattttggcataggcatcacatattgctggagtggaaagacccatgcactcaggtcctgctttctataatctgtgacctcgggccagtcactccatttctcctgaactagatcactgatgatctgttgaaagaaaaaatatggctagtaatgccttaattatctcacagaggttttacatggagcaaaaagacaatgtatttttaaatgtactttgttgaaggtgtgtgttgtcgagacaatacagcagtgaagagaaggcatgcaaagctgtcttgttggagtctggctaaagagcaccaaagcagcctgttgtgggatgtcctctgggggccacctggacttgctatgttaacatggagggactaggcaggggtatgaagaaggaagcccagcagagcaggaggcagcagcaacaatgagagattggttatccatatgacttggatctgtgtccccacccaaatctcatgttgaattgtaatccccaatgttggaggtggggactggtgggaggtgactggatcatgggggtggatttcttatgaatggtttagtaccatccactttgtattgtccccgtggtaatgagtgagttcttaagaaatctggtcattgaaaaatatgtggcacctcctccctctctcttttgctcctgccccggctatatgatgcaatttgtcttcagccatgattgtaagtttcccgaggcctccccagaagctgagcagatgccagcatcatgcttcctgtacagcctgccttccatgagccaattaaacttctttcctttacaaattaaaaaaaaaaaaaaaaaaa

SEQ ID NO: 59109 - DNA, 1067 bp, Homo Sapiens
gtgcgagatgagcactatgttcgcggacactctcctcatcgtttttatctctgtgtgcacggctctgctcgcagagggcataacctgggtcctggtttacaggacagacaagtacaagagactgaaggcagaagtggaaaaacagagtaaaaaattggaaaagaagaaggaaacaataacagagtcagctggtcgtctatcaatggttcgaatgaaatccatgtttgctattggcttttgttttactgccctaatgggaatgttcaattccatatttgatggtagagtggtggcaaagcttccttttacccctctttcttacatccaaggactgcctcatcgaaatctgctgggagatgacaccacagactgttccttcattttcctgtatattctctgactatgtcgattcgacagaacattcagaagattctcggccttgcccttcacgagccgcaccaagcaggcaggtggatttcttggccaccacctccttctgggaagttctcttgaactaagaactcttttattttcaatcattctttctagacaccacacatcagactggcaactgttttgtagcaaagccataggagccttactacttgggcctctttctagttttgaattatttctaagccttttgggtatgattagagtgaaaatggcagccagcaaacttgatagtgcttttggtcctagatgatttttatcaaataagtggattgattagttaagttcaggtaatgtttatgtaatgaaaaacaaatagcatccttcttgcttcatttacataagtattttctgtgggaccgactctcaaggcactgtgtatgccctgcaagttggctgtctatgagcatttagagatttagaagaaaaatttacaagccaaatacatgacataagatcaataaagaggccaaatttttagctgttttatgtacaaggagagatctgtttcattttgttttgccgtatttctagatataagttttagcatgggccaggaaggactaaaataaaagtttttaaggtaaaaaaaaaaaaaaaaaaaaaaaaaaaaa

SEQ ID NO: 59110 - DNA, 1861 bp, Homo Sapiens
ggacaacttttaaaatacaaatttgtaacaaagggtttagccagggattcttagtctagggattcacgaatccccagaaatcttttggaaaatttccagaaaaagcaaaactacattttgctgtaagttgtctttatattagacagggctctgggatcatactccttccctttttctaaaatgctagtttgtgttttataattagaatataaattctgtgagatctgggacttgatctgattcatttgtgtctatagtccaagcacaatcctggcatacggtgaaagctcagtaaatattttttgaataggaaatatttgtatttattcatttctagtaattttcttaaggctgtccttaagtcatatatttaaaaattaatttgaggttactaattggtatgaaagtctgtatttatagagttttatactttcatgcaaaaagttcttcccttgaaaaagactcataatgcttttgaattagtatgccactgatcaagtagttgcacaagttggtaattttccaagggtaaagttgagcaggggggtgacctgtatttacccagctcctacttgtgtcaggccccttatttatacacacacagagtcataggtaatcttctcagcacccttcttttacacatgagacttacagagatgaggtagtttgcacaggtcacaaagctaaataaatcatgcagccagaatttgaatagtctgactcctattctctttacattattccatgtggcctctttaaggtagagattatgtatgtctgtaccccacctgtgtctaccgtgcaggaaaaatcatttcccattcttttgtaaatatcatgtttatcagtcttaagatactctattttattgattgagacagggtctcattctttgtcccaggctggagtgctatggcaccatcatggctctctgtagcctcaacctcccaggctcaagcgatcctcccagctcagcctcctgagtagctgggattacgggcacacagcaccacactcggctaattttttgtatttttttgtagggatagggtctcgcttcattgccagggctagtcttgaactcctgggctcaagttatcttcctacctcggcctcccaaagttctgggattacagacgtgagccactgcatccaaccacaagataatctgtttttaatggtaaatattatataaagttgttgaaaggaatgagttaagcccaattccttgtcagttatttttcacttaaatacacatatttatcttaatccaaaaacggtttaaggcattttgatcttagagaagggaaggaaaaacaggacagattagtctctttttgagcccaaaagaatctctgtattgttttcagattattaaattttgcatgcatttttctgttttactttaaacggataaatgcaatacccatagctgcttttacatttttatatcacagtttttagaactatgtgaatattagttttttcatatttactttttattcacttgtcaaagcattgctatggagaagacctatactgtttgaaaatgcaggccgggcgcggtggctcatgcctgtaatgccagcactttgggagggcgaggcaggaggatcacgaggtcaggagatcaagaccatcctggctaacatggtgaaaccccgtctctactaaaaatacaaaaaaaacaaaattagccaggcgtggtggtgggcgcctgtagtctcagctactcgggaggttggggcaggagaatggtgtgaacctgggaggtggagcttgcggtgagccaagattgcaccactgcactccagcctgggcaacagagtgggactctgtcgaaaaaaaaaaaaaaaaaaaa

SEQ ID NO: 59111 - DNA, 535 bp, Homo Sapiens
  misc_feature (100)..(100): n is a, c, g, or t
  misc_feature (252)..(252): n is a, c, g, or t
  misc_feature (442)..(442): n is a, c, g, or t
  misc_feature (449)..(449): n is a, c, g, or t
  misc_feature (478)..(478): n is a, c, g, or t
  misc_feature (489)..(489): n is a, c, g, or t
  misc_feature (515)..(515): n is a, c, g, or t
ccctcagtcttttagactctcagctgcacaacttgattgccttacaaatgacctgcttcaaggatgtggaaattcctaatttcttctgggaaccttctgngacaccttcaccaggaacatcaacatgtatttccctgctgccgtatttggttttcttcccatctcggggacccttttctcttactgtaaaattgtttcctccattctgagggtttcatcatcaggtgggaagtataaaccttcaccacctgngggtctcacctgtcagttgtttgctgattttatggaacaggcgttggagggtacctcggttcagatgtgtcatcttccccgagaaagcgtgcagtggcctcagtgatgtacacggtggtcacccccatgctgaaccccttcatctacagcctgagaaacagggatatgaaaagtgtcctgcggcggccgnacagcancgcaagctaatctcaaaaacttcttaacnggtccattccntttggaggatgggttaaaaaaggccncaggggcaaatagaatggtt

SEQ ID NO: 59112 - DNA, 2954 bp, Homo Sapiens
acgcgccgcgtgcccggccgcgcccagcagggtttccaggcctgaggtgcccgccctggccccaggagaatgaaccagccgcagaggatggcgcctgtgggcacagacaaggagctcagtgacctcctggacttcagcatgatgttcccgctgcctgtcaccaacgggaagggccggcccgcctccctggccggggcgcagttcggaggttcaggtcttgaggaccggcccagctcaggctcctggggcagcggcgaccagagcagctcctcctttgaccccagccggaccttcagcgagggcacccacttcactgagtcgcacagcagcctctcttcatccacattcctgggaccgggactcggaggcaagagcggtgagcggggcgcctatgcctccttcgggagagacgcaggcgtgggcggcctgactcaggctggcttcctgtcaggcgagctggccctcaacagccccgggcccctgtccccttcgggcatgaaggggacctcccagtactacccctcctactccggcagctcccggcggagagcggcagacggcagcctagacacgcagcccaagaaggtccggaaggtcccgccgggtcttccatcctcggtgtacccacccagctcaggtgaggactacggcagggatgccaccgcctacccgtccgccaagacccccagcagcacctatcccgcccccttctacgtggcagatggcagcctgcacccctcagccgagctctggagtcccccgggccaggcgggcttcgggcccatgctgggtgggggctcatccccgctgcccctcccgcccggtagcggcccggtgggcagcagtggaagcagcagcacgtttggtggcctgcaccagcacgagcgtatgggctaccagctgcatggagcagaggtgaacggtgggctcccatctgcatcctccttctcctcagcccccggagccacgtacggcggcgtctccagccacacgccgcctgtcagcggggccgacagcctcctgggctcccgagggaccacagctggcagctccggggatgccctcggcaaagcactggcctcgatctactccccggatcactcaagcaataacttctcgtccagcccttctacccccgtgggctccccccagggcctggcaggaacgtcacagtggcctcgagcaggagcccccggtgccttatcgcccagctacgacgggggtctccacggcctgcagagtaagatagaagaccacctggacgaggccatccacgtgctccgcagccacgccgtgggcacagccggcgacatgcacacgctgctgcctggccacggggcgctggcctcaggtttcaccggccccatgtcactgggcgggcggcacgcaggcctggttggaggcagccaccccgaggacggcctcgcaggcagcaccagcctcatgcacaaccacgcggccctccccagccagccaggcaccctccctgacctgtctcggcctcccgactcctacagtgggctagggcgagcaggtgccacggcggccgccagcgagatcaagcgggaggagaaggaggacgaggagaacacgtcagcggctgaccactcggaggaggagaagaaggagctgaaggccccccgggcccggaccagcccagacgaggacgaggacgaccttctccccccagagcagaaggccgagcgggagaaggagcgccgggtggccaataacgcccgggagcggctgcgggtccgtgacatcaacgaggcctttaaggagctggggcgcatgtgccaactgcacctcaacagcgagaagccccagaccaaactgctcatcctgcaccaggctgtctcggtcatcctgaacttggagcagcaagtgcgagagcggaacctgaatcccaaagcagcctgtttgaaacggcgagaagaggaaaaggtgtcaggtgtggttggagacccccagatggtgctttcagctccccacccaggcctgagcgaagcccacaaccccgccgggcacatgtgaaaggtatgcctccgtgggacgagccaccccgtttcagccctgtgctctggccccagaacggccactcgagaccccgggattcatccacatccacacctcacacacctgttgtcagcatcgagccaacaccaacctgacaaggttcggagtgatgggggcggccaaggtgacactgggtccaggagctccctgggccctggcctaccactcactggcctcgctccccctgtccccgaatctcagccaccgttgcactctgtgacctgtcccatggatccrrrractrratcttggccctgttgcctgggctgacaggagrrrrrrrtttttttccagtaaacaaaacctgaaagcaagcaacaaaacatacactttgtcagagaagaaaaaatgccttaactataaaaagcggagaaatggaaacatatcactcaagggggatgctgtggaaacctggcttattcttctaaagccaccagcaaattgtgcctaagcgaaatattttttttaaggaaaataaaaacattagttacaagattttttttcttaatgtgagatgaaaattagcaaggatgctgcctttggtctctggtttttttaagctttttttgcatatgttttgtaagcaacaaatttttttgtataaaagtcccgtgtctctcgctatttctgctgctgttcctagactgagcattgcatttcttgatcaaccagatgattaaacgttgtattaaaaaaaaaaaggagaaggagcgccgggtggccaataacgcccgggagcggctgcgggtccgtgacatcaacgaggccttaaggagctggggcgcatgtgccaactgcacctcaacagcgagaagccccagaccaaactgctcatcctgcaccaggctgtctcggtcatcctgaacttggagcagcaa

SEQ ID NO: 59113 - DNA, 1128 bp, Homo Sapiens
gagagaagctgggagaatcgggaacctgggggctagtgacctgcacacagggcaggggcactcggcagttcccagaggccacccctcccaccccagacatccagacatctggaactttgggtgccaagagtccagcttaatgcaggcagcctggcttttgggggctttggtggtcccccagctcttgggctttggccatggggctcggggagcagagagggagtgggagggaggctggggaggtgcccaggaggaggagcgggagagggaggccctgatgctgaagcatctgcaggaagccctaggactgcctgctgggaggggggatgagaatcctgccggaactgttgagggaaaagaggactgggagatggaggaggaccagggggaggaagaggaggaggaagcaacgccaaccccatcctccggccccagcccctctcccacccctgaggacatcgtcacttacatcctgggccgcctggccggcctggacgcaggcctgcaccagctgcacgtccgtctgcacgcgttggacacccgcgtggtcgagctgacccaggggctgcggcagctgcggaacgcggcaggcgacacccgcgatgccgtgcaagccctgcaggaggcgcagggtcgcgccgagcgcgagcacggccgcttggagggctgcctgaaggggctgcgcctgggccacaagtgcttcctgctctcgcgcgacttcgaagcccagcccagcgcctcgccgcatccgctcagcccggaccagcccaacggtggcacgctcgagaactgcgtggcgcaggcctctgacgacggctcctggtgggaccacgactgccagcggcgtctctactacgtctgcgagttccccttctagcggggccggtaccccgcctccctgcccatcccaccacccggcctttccctgcgccgtgcccaccctcctccggaatctcccttcccttcctggccacgaatggcagcgtcctccccgacccccagtctgggcgcttctgggagggctcttgcggtgccggcactcctccttgttagtgtctttccttgaaggggcgggcaccaggctaggtccggtgccaataaatccttgtggaatctgacttgaggggc

SEQ ID NO: 59114 - DNA, 2815 bp, Homo Sapiens
cttcgaatcagttattttataacagtatatactaaacatcattactccttttcaaacataaataacgcaatacaaattggacaaaaaattcaggaaagatctgggatcaaaaaggaggtattgaaacatcacatgtactccataattatatacaaatattttgtacccataatatttaaaatacagaaaattaaaaggtacattttcctcaaagtgcatgcttcttttgctatgcaaaactgcaggatatggaaagaagtgtattaaaacactaaatcactttatgtggaagataaaagggatggtacccaatgtacaacttcatgtagtgcactgatatattcaatataaatgatgtattaacttcaagataacatgagaaagttaaattatctaacttatttcaaactaggggatagtatgttctcattattagaagccagaattctgcttatccatttctattattagaaaaaaacataatttttattcttgtcttggaaatagacaccttgatataattctctgtaaatgtagcatgatagtctgtttacagagtttatatcattccaagactgcacttctaaagtgagaaaatattaaaggatataaactcactcctctctacaaaattccttattttttatgcaatggctttaaaatgtatggaaggggagttatggaaacaatccatacctggaaagcattctatccatgcctttgaaatggttatctagtactagattcttatcggtgcctagctatgtaatgtgtgtagcttaagatttttaagaaagaaggataaaatgctcaatataaatttaaaaagcacttttattggaatattgagtcatgtatttgctttctgtaagtccttttatctataaaataatagttgagaaaggcaaatagaatatgtggaggaattaaaaattcagttgtagggtggtgaatgaaaaccaaatttttcattcaccacattaaatgtaaatgggtattatactcaatttaagcagcaaagttgctcctttttttttttttttttttttgagacagagtctcacactgtcacctgggctggagtgcagtgttatcatctcgcttcactgcaacccctgcctgctgggttcaagccattctcctgccgcagcctcccatgtagcttcttaagatgtgaagatttttaaattaagatgactcttgggatgaaccatttggtgttggttaaagacttttactgacatatttttaataatttttttaacttttattttcaggtcaatggcacatgcgtaggtttgttatgtaggtaaactagtgtcacagggatttgttgtgcagattatttcaccacccagctattaagcctagtacccattaattgtttttcctgatcttctgcttcctcccaccatccaccctcccagaggccccagtgtctgttgtttccctctatgtgttcatgtgttctcataatttagctcccatttgtaaatgagaacatgcagtatttggttttctgttcctgccttagtttgttaaggataaagacctccatccagctccatccatgttcctgcaaaggacttgatctcactctcttttatggctgcctaacattccatggtgtatatgaaccacaaaataaagatggttcttaacttttaaattaagatttttaaattaagatgaatcttgatttttaaattagtatggttttaagatagttttacagatagattagataatctatctagagatagatagggagagatatctatcaatacatatctctatctagatatagatagatggttttctatatagacctatctatctatatatgtatacatctatatatgtctacacatatctctatacacatatatatatttatatctacatctgtatttctacatgtatataggtatgtgtatatctacatgtatatatgtatatagatagatatatacataggtatctgtatatatgcatatacatgcctatctatctttatctacatgtattacatagatagggtaattactgataaatcctttggtcttctttgtaaatctctgggctaaagacccctccagtattatacgtgttctggtctagattgctcactcaccggttctcctcactatctagagaagatccacttagcaggcctccccttaaagaagggcaccttaactggactcactcctcccatagtagactgcacagtacacaagcagaagaggagagctcagtaataaagtcaccataaaggataatttttaaatgaataaagacatcagaaaatccagtattggctagcacatatggctatcagcaagctcaccctacaaaaaaatagtgagaaaacagttcgaatattggccgtttggggcacatattctacaaaaaggaaaagttttgaaatgtatatatatttaatttaactctttaaaatatttgtaggcaagcccagtggctcacacctataatttcagaactttgggaggccagggcaggaggattgcttgaggccaggagaccagcctgggcaacatggcaagaccccatatctacagatggttttaaaaaattagccaggtataacacgatgaaaccccgtctctactaaaaatataaaaattagccgggcatggtggtgggcgcttgtagtcccagctactcgggaggctgaggcaggagaatggcatgagcccgggaggcggagcttgcagtgagccaagatcatgccactgcactccagcctgggcaacagagcggagactccatcttaaaaaaaaaaaaaaaaaaa

SEQ ID NO: 59115 - DNA, 585 bp, Homo Sapiens
  misc_feature (547)..(547): n is a, c, g, or t
  misc_feature (553)..(553): n is a, c, g, or t
  misc_feature (570)..(570): n is a, c, g, or t
  misc_feature (572)..(572): n is a, c, g, or t
aaggtatttattaaccttagtagatgactaaaggaagaaacacacatacaaaagtctggtcctaccaatgggcttagcttccccaggaaccaggaaattttactctcccacccctataaccactgttgcaaaatggctttctcttccactgaccaggtttctcatgcccaccctttgctaggtaaagagtagtaaaagagaaaatggccaatgaaaaggagggggaaacactttttaaaaataactatattttcaggacaggctctgtgtgagatacactctaacgtggggacacgccacagtcctcagtggcccctgcccatcctcccaactcactgtacagaaacactctatggaggccaatatttgattctagaagccagtgtccctcaacccaacttctgcaactccatacccaacaaatgatgctcaaaaacaaaagcagctattttaagatcactaaacactggctggtgatggcaaaactggggctttccttattcttttcttcattttgcttttatcaggccctggccttctactttcntaaaangaatttactccaaattntngggaagaaatctt

SEQ ID NO: 59116 - DNA, 81914 bp, Homo Sapiens
tgtttgtttgtttgtttgtttgtttgtttgtttgtttttggagagatgaggttttaccatgttgcccaggctggtctcaaacttgtgagctcaagagatctgcccgcctcaacctcccaaagtgctgggattatatggatgtgagccaccatgcccagcccaatgtctcagactttctgtggttatttttgctttattccaatacctagctgcataatacatctaaaatctatgggagtagcttccagacatgagtatttttcgggaactcttcagatgcctgcacacccggtaagaaactctactctagagaatttatgggtcgactgttccagaagcctcaggagtacagttctgccttttccttgatgctgtttgtagaaagaattggaaaaaaaaaaaaaagaaaagaaaagaaaaaacaaaaaaaaagaaatacaatctgccaaatgccttttatgtcaaacgcatttttttctgatctgagaagttttgaaaaagtatagcaattaattattaatatttgccaatgactcacctttactgagattaaaattaatatgaatttattttagaaaactccctatgagtggctatcaaaatattctatgggttatcaaagaaggcaatatcaacaatagtggataggctttaatgacatttttttaaaagtaaaaaaaaaaaaaaaaaaagaaaatttattacagttgaatctgagtgactgaaaaccctgctactacacaattggacccactgttaatttgactggctttaaaaaaaaaaaaaagacacaattggatttgttatatgagcctttttcctcccatgtagtttctttccagtaactcatctccacagtaacaaatttgaccttaatactttcctaagtatggttgaacccgtaactcagaaaaacggtgtcatctccttagtctctcctttgctttataagggttaatgtttctgtctggttatggatggatttgacctcttttttcatgctggtataagtcagcaatttacatgaggtgcctggcccttgaagacaattcagctcatgcctcatgtcacacctttccttagaggcttcctgtttatgccagcatgtagcaaaatacctaatacatagtaggttctcaggaaatgtctgcatgaacacttgttgacaggatcagatacgcacttctgcttcttctacaggagagaagagaatagttttgatagagacacaattgctcctgagcctcctgccaagagagtatgtaccatcagccctgctcctcggcacagtcctgctctcactgtgcccctcatgaatcccgggggccaattccatcctacccctccacctcttcagcattacaccttagaggatattgcaacttctcacctgtatcgggaacccaacaagatgctagagcatcgagaagttcgtgatagacaccacagtcttggtaagcaaccgaagcagcatggtaaattcagactggattcttggatttctttccaactcaatgataaagtcaaataatatgattgctttttcccactgattggataaaacaatattatacatagactattagaatcatagttgatcttatttgatatcaatctcatttgataccttgttgctatgatatgatagaagtacagctaggtgtggtgactggtgtctgtaatcccagctcttagagaggctgaggtggaaggatcacttgaagccagtctgggcaacatagtgagatcccatctctacaaaaaattttaaaaactagccaggcttggtggcatgcgcctgtggtcccagctactagggaggctgaggagggaggatcagttgagtccaggaagtcaaaactacattgagccatgatcttgccactgcattcagcctgggtgacagagtgagacctgtctaaaaaagaataaaggggtatcgcctattctcagatggttcagaagaagagaatgaaaaagcaaaggaggtaaaatgttaacatttgagaactctgtttgaagatatgtgagaattctttgtgctccttttgcagctcttctataaatctgagtttattgcagaataaaagtttttaaaattaggccaagctcagtggctcatgcctataatcccagcactttggaaggccaaggcaggaggatcacttgaggccagaagtttgataccagcatgggcaacatagagagacctcatctctacaacaacaacaacaaaaattaaaaatgaggcaggaggggctgggcgtggtggctcacgcctgtaatcccagcactttgggaggctgaggtgggtggatcatgaggtcaggagatggagaccaatctggctaatacagtgaaaccctgtctctactaaaaatacaaaaacttagctgggcgtggtggtgggcacctgtagtcccagctactcaggaggctgaggcaggagaatggcgtgaacccagaaggcggagcttgcagtgagccgagatcacgccccagcactccagcctgggcaacagagcaagactccgtctccaaaaaaacaaaaccaaacaaaaaacaaacaaaaaaaatgaggcaggaggactgcttgagcccaagaggtcaagactgcaatgagccatgatggtgccactgcactcccctcctgggcaacatggtgagaccctgcctcaacacaataaaaaatgtttttaaaattaagcaggaaagatgcaagatttcaccttggaggagaaagtgcatggacatttaggtcaggaggtgaggcatatcgaaatcttggctctgcatcctaactagctgtgtgatctcaggcaagttgcttgggctctctgagcctcagaagagtaatttctaaatgattgtaacgccaccccctgtgctaggttgttgttccatttggaatgcctggtatataggtgctcagaaacctttaaatttaggaagaaacagaaaagaaaccttaacaaacctcttctagttttggacagagcggtttgtcatgtactcttacacgttttcagcataaggttttttggagtaaaactgctgagcagagaaccaaagggctatcagcttccagggtttccctaaatttccatgtataccttgttgagtaaaaaactgcaatacatttgccctcacttcctcttacttaggctcactagcatctttcagacgcttggccacagtggggcccctggcatcatgtagtgggatagtagctgaatagggaaggctgtagcagccatggtgttctcagagccaacatttactgagtcgtagctaccacttagattgtgttgtaagtacattgtcttattttatcctcacaggagtcccagacaattgttatcccctttttacagatgaaggagctatggccaaaaatcacttagctaataattggcagagacaaaattcagaccccaattgtcttatgcccaaggtttagatgtactggcagtatgttatgatacttatcctagtgttcaacccctgttactcctatgcctctcttttatctattaaaaactgcttgcgggcggtctggcgtggtggttcatgcctgtaatcccagcactttgggaggcctaggtgggcgaatcgtgaggtcaggagatcgagaccatcctggctaacatggtaaaaccccgtctctactaaaaatacaaaaaattagctgggcgtggttacaggcacctgtagtcccagctacttgggaggctgaggcaggagtagggcgtgaacctgggaggtgggggttgcagtgagccaagatcacaccgctgcactccatcctggcaacagagtgagactccgtcaaggggggggaaaaaaactggcttgctttgattggaaatagcacagtgggggaaaaaactggcttgctaattaatggtttcttctggaccttttttgccagtttgacttgagaaagaagtatgctaaaaactaggtatggggtctcactatattgcccaagctggacccctgggctcaagtgatctacctgtgtcagcctcctgagtggctgggactataggcccaccccaccacacctggcttttattactacattttttgacagattttacaaatcatgaggaactcaatatatactgaaataaacagattatcacactaatacatagtcactatgaatattatgactataaattcagactggtaacaggggtgttgtgttaatgactcaaagactaagcactgttactgtatgtgacttaggtttaaaatagtagacaattcttactggtatacccttaattcacacagttgttccattcctggaagtttcagtatatatcaaaactatccccccaccaaaaaaatttttttaagttactgataatattaagctgtttccaagtggttataccagtacacacgctagttttggtggttaattattcgcattgcaccacatccttgtcaacacttagtattatctgacattttaattttttccagtatgttagatgtgaaatgctatgtatgacatacctgtttatttcttttacctctttttctttagggctatttcgtgttttacaattgatttgttggagttttttatataatgtgaatcgtgatcctttgttggttatattgtcattttgtgggtcccccaccccattgtgaatcattgccttagtagtgtgatcaaagttattatgaatatgtgtgtatttacttggtagaatttgcttctattgtgtttttcctgctatctttgaatttaatctgtaatttctaataggtctaaatggaggctatcaagatgagttggtagatcatcgtttgacagaaagggaatgggctgatgaatggaaacatcttgaccatgtaagaatcttgtagtgtgtaatgtccctaactctttattacttttttttgaaacaggagtctcgctctgtcacccaggatggagtgcagtggtatgatctcagttcactgcaacttctgcttcccaggttcaagcaattctcctgcctctgtcttcggagtagctgggattacaggtgtacgccaccgtgcctggctaatttttgtatttttagtagagacagggttttgccatgttggccaggctggtctcaaacccctgacctcaagtgatctccccacctcagcctctcagagtgctgtgattacaggtgtgagccaccgcactcagcctacttaatgctaccaataattaatggaacatgtatgcttgaagtgaacataaccacagccatgacatcctttgcttttaataaaagctggtttagctactactccctcagctgaggaattacagagtcactccctaatctttgtgatgggatgatcacttcaggtcagaaaccaaataaagtcatgtagtataatggttaacaacaaaggtttgtagccaggtgcagtggcacatgcctgtagtcccagctactcgggaagctaaggcaggaggatctcttaagcccaggagccaagacttcaagtctagtctgggcaacatagcaagatggaattcatttgtatttgttaaatttttatcaaaagaaactttctttttatttttttcaattctgctccttctgtagtaaagagattgctttttagcccacatactcatgtttcgtagttttagaacacaggtcagtaacaaacttctaggtaattcaaccccccaaaattgtttatattccaaaattattttgcactctgaaagatagcagccttcctcatctcatcaaaattcataatttctgttagaaatgtgtgtgtgccttattttatggttcagccacagcaaatttacagtgctgcagaccctagggatacaacaaatgctgctgcaacatgaaatagtagactgttggccagaaggccatgcatctgaggttttgtccaaacactggaagccctggtagttattgtcctctttaggtatgtcagcctcaacaccaatgtccttcctagctgatggagaaacagacagcaataaaggttttaaatgtaaacttgatattcctaaatctgtactttaaggaacctgaattcctcatattgcgttggcctgatttacagtgttggttgtttgaatgttcttatctcatctctgcctggccccctctgtgactcaggcgctgaattgcattatggaaatggtagagaaaacaaggcgctctatggcagttctgcggcgctgtcaggaatcagatcgtgaagaactcaactactggaaaagacggtacaatgaaaacacagagctgaggaaaacggggaccgagttggtctccaggcagcacagccctgggagtgcagattctctcagcaatggtaaggggagagtctacgggaaacccaaaataaatgtcagcctttagagcccaccaatctgtcacagaaggcgttttctacttgactttaaagaaaggtggtactcaattgtggatttagggaaactcaggtgattatgaaaagtaaatgagaaaatatatgaagcccctggcatgttttggtgggtggcgcaggaagggggtttttttgttttggatagacaggatctcactgtgttgcccaggctggccttggactcctggcctcaagcaatcctcctgcctcaccctcccaaagcaccaggattacaggcctgagccactgtgcccagcctcgtacttggcgtgttcaaaaaatgttaattcttcgtggagaatgagaatatttgtgattttgttctgtctttaactctttacatatatgtgtgctaggtgttggtcagagtgtttggttgtcaaattcagcctggctggatgtatgtactaggcactcttgtgtcatcactttcatttctcacagtagccctgaaagtgtttaccttaccttccctcctcctgtccccagcccaccattcaggaaaataccactcaatccaccatggcctggtggcctcctacaaaaggttttaccataccacgctgggttgtttccccttgcctttcagagtctgaagcagcagcaatccagagtacatccagcaaacctcagttattcccctcaaaatgttccagcacattcacccagtaactgagaaagtgccctatccaaaggcatagctgagtgacaggccatctgtgataagactcttcccacgcactctgagttcccaaatgttcaccacgaagaacaagtctcttacgacagacctagtatgttccattgaaggcagctattagtctctaaaagactgtaaggaaaacttgaggcaaagccagaattaatacagtatgtacagacagtgggagttaaaggctcacctttccccaccccacccacagcagcagctctggagccaaccatggaattacaaccattaggtggaatatctagcacaacaaggcgtcaacacatatgtagagttatatagtatgattcctttcgtaaaaactcgaaaaacaggccgggcgtggtggctcatgcctgtgatcccagcactttcggaggctgaggtgggcagatcacagggtcaggagatcgagaccatcctggctaacacggtgaaaccccgtctctactaaaaatacaaaaaattagccaggcgtggtggcggacgcctgtactcccagctactggggaggttgaggcaggagaatggcgtgaaccccggaggcggagcttgcagtgagccgagatcgcgccattgcactctagcctgggtgacagagcaagactccatctcaaaaaaacaaacaaaaaactccaaaaacagacaaagctaatcttctggtctccctcactttctgaacatttgcagatccctgtgcgactttcggacagggagaaaggcttttggagacgtagctaaagtttacacccaagccatacctcattcatcagtgagtccacatgtgtgcaggtgagaagcatagagtacagagggagctgcagtcgtgagccagtggttgctgagccaagatacagctcttgctggagtcattcaggtcttgctggagtcatttaaacatggctatgcatgaccactactcacctttctcaccttttgcatcaaggattagctctggggagcatgttttctgatttgcctgagacagtccagtttatacctgtgtcctgttaatagttattactagcatttccctcattctcaacaatgaaggcaatctggatgataagttatattgtcattctaggtttggtttctgacagcactatcaacctgatttagatagtatattttagtgtcatttatatgtttatctcatgtttattacttgtccattttagtatagtatgacagtataattcatatcctaaataaatgtactatgcaaaatgtgaaccaaaatgactccaaaaagtgccactggtctgattacatgaggagcttgggcacggttggcttcatcaagaaagtcttactgtgaaattagttctttttgtttgtttgtttgttcgtttttgtttgtttgttttgaaatggagtcttgctctgttgtccaggctggaatgcagtgcacattcttggctcattgcaacctcctgggttcaagccattctcttgcctcatcctcctgagtagctgggattacaggcacctgccaccatgcctggctacgttttgtatttttagtagagatggggtttcaccatgttggccaggctgggctcgaactcctgaccttgtatgatccacccaccttggcctcccaaagtgctgggattacagacataagccaccatgcccagcctgaaatgagttcttagacacatagttgttttacattctggcatatgttataccaataatcatagtttgagtagcattgtcctatattgggcagtattcttagacatttcaaagaatttcaccaatgactttttttttttttttttaacagagtctagctctgttgcccaggctggagtgcagtggcatgatctcggctcactgcaacctctgcgtcctggattcaagggattctcctgcctcagcttcctgagtagctgggattacaagcgcctgccaccacacccggctgagttttttttttttcagtagagacggctggtcttcaattcctaaccttgtgatccacccgcctcgtcctcccgaagtgctgggattacaagcatgagccaccgtgcccggcctcaccagtgacttttaaataagtaattagtgtttttgtttgagacggagtcttgtctgtcacccaggctggaatgcagtggcacgatcttgcctcactgctccccaggttcgagcagttctcctgccttagcctcccaagtagctgagattacaggtgtgccctaccacagccagctaatttttgtatttttagtagagatgaggtttcaccatgtttgccaggctggtctcgaactcccagcctcaagtaatctgcccgccttggcctcccaaagtgctgggattacagacataagctaccatgcctggccaagtaattagtgtttttaaagtcttgggttagctgggtgcagtgtctcacgcctgtaatccccgcactttgggaggctgaacgaggtggatcacgtgaagccaggagttcgagaccagcctggccaacatgtcaaaacactgtctctactaaaaacaaaaaaagttagccaggcatggtagcacatgcctgtactcccacctacttgggaggctgaggcacgagaatcactcaaacctgggaggcggaggttgtggtaagccgagatcacacactgcactccagcctgagcaacacagtgagactctgtcgcaaaaaaaaaataaataaataaataaataaataaaagtcttgggttatgcagaaatccatggtgtggatagttattgaagtaaagtggtttggtgatttggagagaaattgactagaggctttagatggcattattacttttcccatttaaattaatgcaatgtaggtttccttacctgaaaatttatgattcacaatgttttcacaaatagattttgttcagacagcaagcagtgtatttaggtgtcattaaaggatgcataaataagtgcaaaaaccataaggaaaagaagaaaatgcttatcacagagatcaggagactggtttcctctggctgtgtgggtggagggtgcagagttagtgagttctaactacgtctattcttgggacaggattgtcagtctggctagcattatttaaatactactatggcttgccatgacttacctcttagggatttggggttgctggtactgttctgtttcctgaactcaggcttatgatgttaaattgtatattaatatttttattatattgtatgttaatattttatgaactggtcagccatctaactttgcaagtaaaatttttttttgtttgtttgtttgtttttgtttgaaacggagtctcgctctgtcacctaggctggagtacagtggtgcagtctcggctcactgcaacctccgccttttggcttcaagtgattctcctgcctcagcctcccaagtagctggaattacaggtgcttgccaccatgcacagctaatttttgtatttttagtaaagacggggtttcaccatgttagtcaggtcggtctcgaactcctgacctcgtgatccacccgccttggcctcccaaagtgctgagattacacacatgagccactgcatctggccaaatttttaaacaaagaaaaagaatacttaatcagctatcagtttttcctcagaatgacagtcaagctcacattccgggcccttctggatgttatgattctgagacccaaaaatctgaatatagtccacctgtggtggctgacgccagtaatcccagcactttgagaggcagaggctggcaaatcgcttaaactcaggagttcaagaccagcctgggcaacatggtgaaaccctgtctctacaaaaaatatgaaaattagctgattgtggtggtatgtgcctatagtccggctacttgggaagctgaggtaggaggatggcttgagcccaggaggcagaacttgcagtgagctgagttcgtgccaatgcactccacctgggcaacagagcaagaccctatgtccaaaaaaaaaaaaaaaaaaaaaaaaaagaatctgaatatatgtgtttaatgagttcaataagcaggcaagtttgggaaaactgcctctagttaagtccatagcagatggacctcattcagtgtcacagggcttccaggcaactttttagtgacatgtgtgcacaattaagggtgaccactctctagaggtaagcctctaatattggagactgaaataaacagaaatgggaattaatagtagctcttcagggaaaagaaaactaccaataatgtagcattgttaatatctctggtgagaaaaagagaacaacattagaaatctacccaacttatatatccaaatcatgaatttcaaaaagaatgagcagaacaagtagagaggatagaatagttattgaaataattccaaaaaattaccaagacctgcaagacagttccaggttgaatcagtctaccaagtagacaacacaggaaaataaatagacttagtcgtttagcatcattgaaagttagaagacaattctgaaggaaaattattttaatttagaattctatacttaaccaaaacaattaagtgttagattagtaacctacaatttttcaaaaaatgcacctcctgcctaccctttctccacagtatctactgtaggatatgcctcaatatgtgaaagtaaaccagaaaatgggagacactgaattcctgaaagaggatccaacacaagaaaggaaggaaaggaatccctaggctggtgaaggagagccccaagcattagtggcaaagcaggcctagaaagcgcccagtccacgctggaacagcccagaaccttgctagagatttccttaagtaaatgaaatttataaaagatttacacaacaggaggataatttgagattgaattggaagtaattacatagcagcctggcacaatggcttacaactgtaatcctagctctttgggagactgagacaggaaaattgcttgaggccaggaatccaagacctgtctggaaaccctgagatagtgaaaccctgtctgtgcaaaaaatttagaagggaaattaggcggtcatggtggtacatgcctaaagtcctagctactcaagaggctgaggcaggatgacctgagcccaggagttcaagggtgcagtgagccagtgatcagctgtgtatcactgcactctagcctgggtgacagaacaagaccctgtcacacacaaaaaagtaatttgtaaaaatgctgcctttcctccccctacatttttccataggctcaatggttaacaattaatgtattcttgtagaattttctatgtacatatttaaagataatgtttcctaatgttttattttgaaatttccgaaacacgtagaaattttgaaagagaccaccctggccaacatggtgaaaccccatctctactaaaaatacaaaaagaatagccaggcagggtggcgcacacctgtactcccagctacctctcgggaggctgaggtaggagaatcacttgaacccgggaggcagaggttgcagtgagccaagatcgcaccactgcactccagcctgggtgacagagtgagactccgtctcaaaaaaaaaaaaaaaaaaaaatctgtgtgcatttatgttttatacatttatattttagggggtactgtaccttaaaaaccgatgtttataggggaaaaaattaggacataataggtaagtaaaaagaagaaagtgaagatcacttttaatctcactactttgaaatactgttaatttgttcatttgatgggggtgtgtgttttaaaactaaatatttactgtactattttataatctggtttttagcccttatatgagaatttttttatactaaatgaaatatatgtttgagtctaagtggtgaatgagaaatctgatcaaaaataaaactgctgatcatagacagcttctgaccctatgctttttatgtctcttctgcagattctcagagagagttcaacagcaggccaggtacaggatacgtacctgtggagttttggaaaaaaacaggtatgtgtctgactgcttgtaggtcatacatactcactaatttgtgggagcagagaacagataactgggtgaatggttggtaactgggtcctttggttgtataataacttgctcctcatagagctctaggctcctgcctctcctgctctggcttgtcctgcatgtctcctgatacctgtcttgttaatttgcaggtcaggagtttggaatagctccctccagtccctttcacactcttccactgggtcacgctgaggcaataagtacctgttgacatgtcctgtttctgggcttgcaacagagttcattttgcctgatctcttcactggtggctacagtatactgtgttcacactactgccacatttgtgcccaaattctgctctgggcacagctctgtaatccccctgtgctttctttcaccttctctgtgcctaccatagtgaagactgttcttggtaggcctcctcttttacaagaataaaggagggtggggactgcctattttgtaagttcaaggatgaacctcacatcactaatgtcagccttatccaaatattggcattctttcacttcttgcctccccatcccagtttcattttttaagtccaatacaacttttggttttcttactaagataaaatttatttctacaaaaatgtaatacctacattcataaagactcttttaagagcatctagacagtagtaaacaaataaaagatatgaacagacacattatgctatgagaaatacaaataaacatattgcaaaatatttttccttactagtagtcaggataatgtaagataaagcatatctgataaattaaccccttgtctttaaccgtccgttattgacaattttaaaagaccttgttgatgacactcaataattgatcagaggcttatataagaaattaagtgagtacctgcagattcttggaatcattcctcacttttccttttttttttttttgagatggagtttcgcgcttgttgcccaggctggagtgcaacggtgtgatctcggctcactgcaacttccgcctccccggttcaagctattctcctgcctcagcctcccaagtagctgggattacaggcatgcaccaccacgcctggctaattttgtatttgtagtagagatgaggtttctccatgttggtcaggctggtctcgaactcctgatctcaggtgatctgcctgccttggcctcccaaagtgctgggattacagacgtgagccactgcacccggccttttttttttttttttttttttttttgagatggattcttgctctgttgctcaggctggagtgcagtggcacaatctcagctcactgcaacctccacctcccaggttcaagcaactcttctgccttagccttccaagtacctgggattacaggcacccccgaccatgcccggctaatttttgtatttttagtagagatggggtttcaccatattggccaggctggtttcgaactcttgacttcaggtgatccacccgccttggcctcccaaagtgctaggattaggattacaggcatgagcctgtaatgtgcccagccacaagatctcttttaaactagtgagtttgattatttgggagatacctttggttaactatggttaagagcccaactttggtgttgggccagctaggtttgagtccttgctctgctacagtgccatctgtgaccttagacgacctccagtaagatagctagccaaaccgagatgattattaattcatgcttaagctgaggggataaaatgtacctaagagcattgttacactggctcaataagaggcatctgataagagacttatgaaaagttcttggcctctggggtgaagattttcttaaggccagagccataagatggaaagttgtttcatggtagcctagaactctgtgtttgaacctcccttgagcctgtgccatgtgcaagaggtaaaccgtgagggagtgtccttaggcttctggattgtctagtcctgtggacttacgtagggagctacgtattttgggacttcacattcacattctcattgggctgaggctcaaacatatggaatgtgttattttgcagcgtctacattagggaaatcaagcagggcattggtgatgggaggaagtgaacaggaaccaggtaggatgatggtaagtggacagggtttaaaaacccagggcttttggcagtctgcccaaatctatgtctttagcccttgtttgtgcacctagtcttatttatttaattgcctcctggccatttacacctggatgccccagaggcacctccaccttctcacttgcctccacactagctttgtgtggactgtccatttcattgcctagctttagcattcttctctttcacctccacttccaggcccttcggtgctcccaacctttttctgcctcatcccttcctcagtgccacttattcctgcctaaattcagcctcttctatcagttcaatcattgcaccagcctcccggttgctatctctgtctttaatcttccccttgcatagaatcctttatggagtttcctttgaaaataaagtcaagccgactgggcacggtggctcatgcctgtaatcccagcactttgggaggccaaggtgggcggatcacgaggtcaagagatcgagaccatcctggctaacatggtgaaaccctgtctctattaaaaatacaaaaaattagccaggtgtggtggcgggcacctgtagtcccagctactcaggaggctgaggcaggagaatggcgtgaacccgggaggcggagcttgcagtgagcagagattacgccactgcactccagcctgggcaacagagcgggactccgtcgcaaaaaaaaaaaaagaaaataagttcaagccgggggtggtgcctcacccctataacactttaacaccaacgctttgggaggctgaggtaggaggatcacttgagcgcaggagttcgagacaagccttagcaacatagtgagacatcgtctctacaaaaaaatttaaaaattagccgagtatggtgggacacgcctgtagtcctagctactcagaaggctgaggtgggaggatcatgattcagagaggtcaagtccgcagtgtgctgtgatcgcaacagtgcactccagcctgggcaacagagcaaggccctgtctcaaaaaaaaagaaaaagaaggtcaaatttcttagtctggcatgcaagactttttgcaaaatctcatttccatctaccatctcaagcaaaacacatgtcttgattctcccctgcccactgaagagctgatcacttttctccttggaactctagtctcttacgatgacatacacgatggcacctgaaacactttcatacttggtcacaagcagtcaggagagtgtggcctgtgtctagtcacttgcgtccacagccctagctcggtgcccacctccatctccgtacccagccagcacctgcatggatggacacatgagtgtgaagatcatgtgttcctccctgtggagttttagaaaagatcactttgtgtcagctctctccttacttagaattgccgtgggatgggagggaaaagatttctcggccagttgattttactgtcactttcttctagaagaagctgtgaataaggtgaaaattcaggccatgtcagaagtacagaaggccgtcgctgaggcagagcagaaagcctttgaagtgattgcaacagagagagcacgaatggagcaaaccatagcggatgtcaagcggcaggccgcagaggatgctttcctcgtcatcaatgagcaagaggagtccacggaggtcagagctctgcgccctgggggctggggtgagcagctggagtgaccacgcccgctgccttcctctcatacgctgggcaggaagacacaggcagtccactcttgagctcaatgaggataatttttatccagtgccaggagagttttggttctcatgctaagactcttttacatgccaagatagtgaattattacattgtatttttacatacatacatatatatatagagagagagagagaggctcagtgtattggtgtaaattttgagaattcaccctaaagacagagtttgtgtgattgcacgatgatgatgatgaccagcattgacggagtgggcttactgtgtgccagacacccagcaaagttgtatattttctttttgagtctcacaatggccctaatttgcagatgaggagactgtggctcagggaatgcaactaatatacccctttggtgctgaagtcaggatacaggagtaagaaagtgcagggtcctatagcacctaggctttttttttttgagacggagtctctctctgtcccccaggctggagtgcagtggtgcaatcttggctcactgcaagctccacctcctgggttcacgccattctcctgcctcagcctcccgagcagctgggactacaggtgcctgccaccacacccggctaattttttgtatttttagtagagacggggtttcaccgtgttagccaggatggtctcgatctcctgaccagcacctaggctttttacaaataggatagctggtttgtggactgaagtaacaggttgggtgtatctgcctgattgtccaggacccaggatccagggcccaggacttggtgatggttctatacaggacgcttgagtactacagtgaggagaaaaatcaacaaactgaaaaagaatctgtgacaacatgagaacagcccttttgaatttaatgcagtttttctgtaaatttcattttagtcatttttcagctttaaaacaagaaaccagtttctttctgtaagtaggtagatctcatctactggatgggagaccggctgtctttgggacattctcttgaagttcagcactcactctgtcaccgaggctggagtgcaatggtgcggtctcggctcaccgcaacctctacctccgggttcaagcgattctcccacctcagcctcccaagtagcttggagtacaggtgcacaccaccgtgcctggctaattttcatatttttaatagagatgggctttcgccatgttggccaggctaatcttgaactcctagcctcaagtgatccacccaaccttggcctcccaaagtgctgggattacagatgggctttttttttttttttaacaaacaatagaaatgttattttcttgtaatttaaatggtccatttcagtattgtactgtcacacatggcaatgtgcagatgaaaatgcctaaataccacgtggctatcacagaggatgtggtgaaattccttattacagctcttcaatacagatactatggattgtgagaaaatagtttctttaatccccctcccttttcgttctctcctcctcctttgtcttttttttttttgtgtgtgtgtgtgtgtgtgtgtgtgtgtgtgtgtgtgtgtgtgtgtggataacagggtctcactatattgcccaggcaggtcttgaactcctgggctcaagctatatatactcttgcttctgcctccctaagagctgggattacaggcatgagccaccacgcccagcttctcctcctcctttttctttagaattgtttttgaggctgggcacagtggccaatgcttgtaatctcagcactttgggaggccaaggtagtgtgaacacttgagctcaggagttcaagaccagccttggctagatggtgagaccccatttctgccaaaaaaaaaatttaaaaattagccaggcatggtgtcatgcacctgtagtccaggtactttggaggctggggcaggaggatcgcttgagcccaggaggtgcaagcctgaccatgatcgtaacactgcattccagcctgggtgggagagcaagaccccatctctttaaaaaaaaaaagaaaaaagaaaaaaggtgatgacgatggcaagatgagggggaaagaaaagagaattgtttttgagagtgagatatctgtttctcttctctatgtttaactgtgtatgtatagccatccatatcagtatctgtatttgtccttatttatctacttttatctctgtttatctttaactatgtctatctccaaagaaagagtatagcttttggcttagagcatagatcctggatctggactgcgtaggtttaaatcccagctctccattttgagcattgtgcttttaaggaattgtaattttaaataagccacaaagtagcctccaggtgaggtgcacacctggacctatccctgcaaaatcactttcaaaagcagggaagggatagagggcctgtcctttggatgagtttgcattggaccaaaacggctgattctcgtccatcaagaatgttcagctagaatatccttgttgaaatttggcaggtattcctggagtttcttgttcatcttgtgaaaggtggtctggtgtgggggaggaaggaggccaggactggaggttaggagccctgacttctagccgagttccctctcatactggcagtatacccttaaaggagtcagtctccatctctgttcaatgagtatagcagctcctatcctattggtctgatagttattagggaacaggcacagtggcccatgcctgtaattccagctctttaggaggtcaaggtgggagggtcctttgaggccaggaggtcaagaccagcctgggcaatataaggagactctgtctctacaagaaattaaagaatcagccaggcatggtggcacatgcctgtagtcccagctactcaggaggctaaggtgggagtgtgggaggatccctggagcctaggaggtcaagtccagcttgggcaacatagcaagaccctgtctccaaaagaaaaaacaaaacagcagcagcagccttcgttgagtcagattatcagtaaaaacaatgaagattattctctaatgagggaagcaatatcagctgggcgcttataatcctgacactttgggaggctgagacaggcagatcacttgagcccaggagttcaagcgtagcctggccaacatggcaaaacctcatctctactatatatatatatatatatatatatatatatatatatatatatatatatatatatatatatatagtatataatgtgtgtgtgtgtgtgtgtgtgtgtgtgtgtgtgtatataatgtataattacaaaaattagccaggcatggtggcacatgcagaaaggagtaggataaatgttcgtcttaacacatgtggtcttaggatagatggctcttgggggagaccctggcacagagtttggtttggtttctgactattaaaatgagccaaaagatgagtccatgccttaggcaggagagatggccacctgccctaggctggtgctgtgtaaggtattttcacacacacatctcatttcactgttcctgtcatcttgcagggaagtagttttcttgttttacagatgaaggaaactcagaaaggcagtgtgtatttctcatagttaaacagcagtagagggcggagttgaccacaggtgtatgtagttccaaagctggggttctctacatacagccccttgctttactgtgcagggaatgaatggcaagcctgcccctcaatcccagcaaccactaactgatgcctgtgtcttgcagaactgctggaactgtggccgcaaagccagcgagacatgcagtggctgcaatatcgcgcgatactgtggctctttctgccagcacaaggactgggagcggcaccaccgcctctgtggtcagaacctgcatggccagagcccccacggccagggccggccgctgcttcctgtaggcaggggctcctctgccaggtccgccgactgcagcgtgcccagcccagccctcgacaagacctcggcaaccacatcgcgttcctcaacacctgcttctgtgacagctatcgacaccaacggactctgagccccggactctgcttaccctgatggctgctcagcaccacagagtgcttgggctgagggactgactgttggaacccgtgcatgtagctgccgggtcatcagcaagaaatgaattggaggcaggaagagtccaagcctgaataataacaccccacagcctctctgtgcacttgctgtctgcggagccagtgtgccattctctgcacatgggcagccagcctgagctgcctcctccatggctttcctggtttgttcctctctccactgaagctgacttagccggccccttttcagtgtagaccaccagctcccctccccatctccttgagtcagcagactgtccaatgtgctcagccaggctggaggcggcaggcggcaggcagcaggctgtggaggaggcccctcggtcagggagcggcctgcctcacccctgaatagctccttcggccccatctccatcctcagcagatgacactgattggcctcacggggacttgggtaagcaacaggcggcattcaggactcttctcaaccctgctgttcagacttgataagatctcagagtccacaggaaagaagtcactgttgcaataaaagcacccgtagtagcaaaaacataaaacaaataaaacttcccccacatcacagatgattttggacaagattttccaaccttgctggctactttagtttgggacctgttttttttctcatttgattttgcttgtgcagaaaatagtttccagcacatggattgatctgagagagaatgaggctcagttgtggatagtctgttttctctgagcatgttggccaactagtatcgtcaaattattgagtggatcatctcttggaaatgcagaacttctgccaccacttggctatttgcacagtcatcttgttctgtgtccttttatctctcagaccacacacatctggaacgctgtgggcatcttctgcccatgggctccatttggcacctgctgagccacagttgtcctgctggatgtgctgtgcaggttggtaggacttgcccccactgtcaaggcctggtctcatctgaaaagccctcctggacctcaaagaattcttcagacctcatagttacaggtcattatatctactatgttgatttatcatcaggcacacaacttctgtttccttctcttgtgttatctgatagcgtccctccttgagctcatcagaaaggttttatgaaatgtgaaccattttgggaaaagctgatcaatttttcttcctagcttcccattttcaaatgggacatcactcatatccctttcagaatgttaggaactgcctcccacattcttccctgtctttttgggttttgttttttgttgttgtggtggttttttaacacaaagtctcactctgttgcccaggctggagtgcagtggcatgatcttggctcactgcaacctctgccttccaggttcaagcaattctcctgcctcagcctcccgagtagctgagattacaggcgcccaccaccacgcccagctaatttttgtatttttagtagagacagggtttcaccatgttggccaggctgatctcgaactcctgacctcaggtgacctgccttggcctcccaaagtgcagggattacaagcgtgagccaccatgcccggcctgtctttttggttttgatgggagtctgaggaccccgacccctcctgctctccatctttgagcctctggcatcctctcacacccagaaatcagttggagtaagtttaattggccctgctccagctggcctttgaagcacaagtttaaatctccaccttctgtgcactgaccagagtctaaaataaaagttgtcagtaccataaaggaaaagggatccacacaggtagccttctccttggatacaggtacatcttactgtaagaatttcaagtcctggctgggcgcagtggctcactcctgtaatcccagcactttgagagaccgaggcaggcagatcacttgaggtcaggaattcaagaccaacctggccaacatggtgaaaccctgtctctaataaaaaaaaaatagaaaaatcagccgggtgtggtggcacacacctgtaatcctagctactcaggaggctgaggcaagagaatctcttgaacctgtgagccagaggttgcagtgagccgagattccaccactgcactccagcctgggcaacagagcaaaactctgtctcaaaaaaaaaaaaaaaaaggcaaaattaaagaatttcaagtccctaatttactctaaccaagcattttcagtcttacaaagaaatctagtgcacgacacctttaaaatgcctagatttccattgcctaaagtaaggtgtgaccagtgaaacaacagcagagaatcatgttcctttgctgtggaacacataagccccacagttttccagtcagcctaatacatgggtatcccccgaccccatctgcctccttaagccacagtccttggtggggaactctaagggggacggagtcagtaccccggacagggccacatttgcatgagacatggctgtctcacaggtcacagagccattacaacagcttactagtttttcatggatttgttggattaacaccttaagcaggttttttattgttattttgtttgtttgtttgttttgagacgggagtttctctcttgtctcccaggctggagtgcaatcgcgcaatctcggctcacggtaacctctgcctcccaggttcaagcgagtctcctgcctcagccttctgagtagctgggattacaggcatgcgccaccacgcccaactaattttgtatttttagtagagacggggtttctccttgttggtcaggctggtctcaaaccccggacctcaggtgatccccccaccttggcctcccaaagtgccaggattacaggcatgagccactgtgtccggtcttgagcaggtttttaaaatctccagtggccataaaactagccagggtagctcatgcttttactggttggaataaggagccaaaaccaacaaaataatatttattagggctcgatgcccatttctgtggctaaggcttaggtttggtgtgcagagcctggcctgctcttgtgggctgtggttgctgtgacagtttcgttttctgaatctttgtaatgctcttccaccctgctcgtgctgcccagaggctgatctgcaaacctgggcagtattccacactgaagctcagtttgcaaaccttctgctgtgttaattctggtcagtttcacacagaagtcacgagggcctctgcccaggaccttctattcacatttcaagaatccctttctgaaattctccaactctctggtcaggaggaggagcaccattggggcggggtaggcagctagaggcgcaggagcgaatccaggttccttgcgtggttcccagcctctgctgacagcacctcagctaccaggtggggagtggaaattcagcctgcttagaggactgacctctacagttcatatttgcagtgacataaaaggcaaagaggagctggcatggtggtacagaaggtatcagtcaagcgcaggctcttcagaaacctagaaactaaaaagagatgcaacatgtgactggccatcagccagacatgtctagggtgagaccagtgctcagcaccacccgccaaggaacactgatgagttgtgggacattatggtcggccaagtgaggaatgattgcagggaccagagaagaccaaagatgccagatgtccccagagtttcttgagggctgggtttcacgtctttgcttgtcctttttgtccccacttgcctgcaccgtgcctgactcatccagtggggaaggtgactcaagaagttgtttaagcctaggcctaggcagtccacttcgggaggtgggggcactccacactggggggccctgcagctccagggctggtgctctagcagatccgctcaggcacggttgggtgaccgtggggtcaccgattgcgtagattatttctagggcagtgctgggttagaaatgtctgtctggaaacaggacacatcttgccaccacaagtccacacctggccttggctgctgcccgctctctgcagcgtggatttcctttgcccatttgggccagaaggtcaccaggagttcatcactgcttagtgtcaacttgacatcttcagcttccagacagaaaacccatgctttactttgtacagccctgtcccagagttagtaagcctcggcttgtcacctgcttgcaaagggtatagacatcattctgggtagttctagaggatatcgcaacaagtgcgtttgaaggttcagcacagctggaattgtacggtagtgagctcttcaaaatgaaaacagaatgaccggatggccatctgtcctggaaactgtagaattgaataaatcactgaaaatagaacacttcttggaggctttcttcagaactgaactagaaacaaggtttccaggctcccaggtcagtagaccaaaccaacttccttagatttttttttttaagctgtttgcagaaaactgggtggtagcgtgtctgaaccaaacggaagaatagccagcggagcatggactgttccagcacgggccagatggccagctgtcgagagcagccctgcccagattgcggtgggggctgtgccagcggctccgcagggcccttccaactctggagtgtctgtagttcttgtgaaaccaaaacgttgactacctgcctctttcctcgggcatcgacgtgctcatttccaaagatgatggtgcaggtgaccttttccatcgtgagctaagagaaggttaggaggcctgaggggcgggccttgtgtcccctcctccccctccacagcccctgaggtggagcttccctcacagaccccatctggtcgagcctacggctgcccagtgtacactcagtgatgcttataccaaatagggcatgtgcgctggtgtctgttggggacagccccatccctaccttggagtcggcagagaagcagcaataagcattaggcgaatgattgaaagggctgctgcgccaagaggccttcagtccccttaacgtggctttccaacttcctgacgaggctacaaaggctccgctcacaaaagaaagccaataatgtaaataaatagaaaacgaagcctccacgcgtggtttttaaagggggatgatgaatgtgacaccacccacagaatgcattagaatctggtttttctgtgctttgtcattttactctgataggaatttttgttacctaactctgtgcataacttatttaatgtactgtataaatgaaccaaaactgttaaatatgtatttagtttgttctacttaaagtagtcaataaaaaggctatattccttttctgcctcaagctggaatgggaccgggaggaaaggtggtccctacactaggaggtgtcccctcaccctaattcccaaatccttgaggaagagggagagaggggcctcaactggttctagtcgtggcctgaagagcatccaagggcatgaagcagggggtgtctgcaccccatgtgcctggaactggcctctctggaaagccagctgcaccaactggtcagtgccctgtggggaccaggcccaaccaggctggctgctggagcccaccagtgggcctgcggtcaagggccaacaacagcttccagacactccccgttatttcttttaagtggtgtttcgttttgttttgtggggagggggcagggtctctgttgcccaggctggaatgcagtggcacgatcacagctcagtgcagcctccacctcccagactcaggcaatcctcccacctcagcctcctaagtaactggaactacaggcatgggctaccacgcctggctgattttttgtattttctatagagacagggtttcaccatgttgcccaggctggcctcaaactcccgggctcaagcgatctgcctgcctcgcccccgccaaagtcctgggactacaagcatgagccactgcacccggccaaattatcttgtaataaggaaaaatgaaccacagagaatctgaccatctgtcctgcctgaacagggtggtggacttgtggatatattttctagtaacatgtattttcttgtaaaattttaacacaaatgttaacaaacatacctggacttgtcaaatattcacttatgtccttatgacactgatgttaaatcacaggtaattttactgttgccttccaatttaatttatttgctaaatggttgcatcatttaattgaggccataattttttttaacccttcaccttctgttgggcaattggatcgctttcgcgttttccagtgtggcatacatcttctatgcatactctttcttcgcattatttatttccctaggataattttccaaagtgggggtttttgatactgaacatttcttggatccttgaaatctgtacaaactactctccctaaaagcccaacagcttgtgttgcctccagcagcccctgggtggtactttccgtggccctaaggctggtgcaggcacacctgtgtgtggaatttcaggctgccagtccggtttaccagctggtgagctgaggcctcacttctgtcactcagatacccatctgtgctctctccctgagacccgcctctcctgaacagccttgcccaagaggctcgttgggaccactagcttcacaatcccctagaatgcaaggggagagggactggttactagatctggagacgaggagaagggctagcctatggcgtaggggttggctgtatgatctttggtgcaggtggtgccaactgcaaacctttctgggctgcactgcaatctgcccacctagaacaatgacaagatctcagtcatgggactgtcagccctccacaagagcactatgttggtggaaacggaatgtgccatagaaatggcaggctgaaaatcttttcgtgaccacaaaacacccagatgccagataaattataatgaatgtacttttaactgtattgctgaggtcacagataggacatttccaagaactcaagagttggagggagattgcctctaggcgcaatgtgaggcttggttttgagcatatacaaagtacggaaacaaaaccggggcctttccacaatggcaggtagctcagcacctttggcaccgtgaaaaggcggcagggaaaatctgcccatctgcaatggaaactgaattggaaacagctctgtccctgcttgagaaaaagaaagaaaaactgggccgggcgtggcggctcacacctgtaatcccagcactttcggaggctgagatcacttgattccaggagtttgagaccaacctgggcaacatagtgagacgcccgtctcaaaaattaaaaacttagctgtacatgtcaggtatatactgaaggaaggtcagggaatcctggtgctgagaaattaagataattaaggaccttcagggtcaatattgtgtgtcaaccaattataagctgtccggaaacactactgaaccttcaagaaaatgagccattgttagcaaagtcaacaggaacaataattgatttaacccctgggacttcagatattacaatcaccagatacaggcagggcacagcagttcgcgcctgtaatcccagcactttgggaggccgaggagggcagatcatgaagtccggagtttgagaccagcctgagcaacatggtgaaaccgtctccactaaaaatacaaaaattagccgaatgtggtggcaggcgcctgtaatcccagctactcaggaggctgaggcaggagaatcgcttgaatctgggaagcagaggttgcagtgagccgagatcacgccactgcactccagcctgggcgacagagagactccatctcaaaaaaaaaaaaaaaaaaaaaaaaaaaaaagcacaccagatacagaatacaaaatatgaaacctctgaagatggcactgaaaaacaatgagcaaaaagagtctgaaaatgactaggcagatttgaaaatagaattctggaaatgacaatcattgaaataatgtgttattcaccaatagattacatcaacctgaaaaagaaaaaattagtggtgcgttacctttgtcagaaagagagcaaagaggccgggcgcagtggctcatgcctgtaatcccagcactttgggaggctgaggcaggtggatcacgaggtcaggagatcgagaccatcctggctaacatggtgaaaccccacctctactaaaaatacaaataattagcccggtgtggtggcaggagcctgtagtcccagctactcaggaaagtgaggcaggagaatcgcttgaacccaggaggcagaagttgcagtgggccgagatcatgccactgcactccagcactccagcctgggtaacagagcaagacctcatctcaaaaaaaaaaagaaaaaaaagagacaaataattgggaactgtgaaagatctgttcctctggaaggttaggaagggaaagccttttcatgtgttaccaagagcagcatccaagagcctgctaatgtgtttctcagcagaaagggcactgtcctgaggtggggataggatcttgggaagcaaacatgtctcttgcccgtctctgcttgtttctgactgctggtatttcagggtcagggtcacgattaggcatgtctccttcttagccttccttccaagaggcttgggggaaccagcgacagtccccactccactcctcaggtgggcttcattgcctgctgccaggagccctcttgtggacagagctggactttccccctgggttgccaccatccctaagccagattcctttccagagtacacaccagcagcttttccttccccttcgcatcagcattttctcaggctgcctttccaccccatgagttaatatttgctaggttcctcctagagttccagaagtgatcggggatcagtctccccaccttctgagggctggctcacccaggccctcgcactgggctcgtccttgctgccccgtctgccattttgcaggccccgaggcctggcattgttccttcttttggtgtagctgcctctacctcctccagctggggcgggtttctgctaccggagggtgtcctctcccagcgctgtttactcctgatggctagcagctgttggtgccagggagtggatccctcctgcgtgactcggagcaaggcacttattcactgagctttttcctccgtaagctggggatgctaacgatgcctatacctctggggtgttgcgagggtaaaatgcaatcaacaacatgggtatagcccctagcacagggcctggcacccaaggcacccctgtaaactggttgctgctataacctgtttctctccccaccaatctgtggtttctttgaggattgatctttgtgtccagcactctatgtggagcctggtgtcctgctgaagtagtatgtttcgagaataattttttgaagaccacctaattctcagtccctttcggctcataagagactgtgttaaggggacttgttaggagagctgtagggcattggccaccatctagactgttgctatctccagcctggcctggcactgagccaatccctgggacaggtttgaatatttacaggtgagtcacaggtgcaggtgtgaggaaggggagaggacaggtgcagggagtgggtggaagggtgggggcggcagctggccaatgagcccggagctctcctgacttcagggctctgcctgcccttgaccgagtgctgtcaccagcccagaacatttgatcatccccagcacctgccacaaagcaggtgcccagcgcaggattgggaaaggcgccccagcacaatggcactcacctgctccttacagtggaagcgtttctgtggcggacgggtggcttgggacaaaagccacagacagggtgactggggttgtaaatggcccagccttggctgccaggacatgaaattatgaccttgatgctgaaggcagtgggtgccattgaagggtcttggccagaggtgcgtttttcaaaatggcaacatttcgaaagccgcctctggctgtgtctttacagggaatggacggggtgggagccaggtaaagaagttgctgcagtcttccacgccagagaggacggtggccctgacttgggggctggggcgaggcacaatggtggggatggcaggctacagatgaggtgggctcgtgagatcgacagacaaggcagaggcttgagggcttcctccaggtccccacagccccagcccagctcagacgtctgttctgtggctgcagctccagccatgtctgcgctcagctccacccccacccactccctgtctgggaccctcctgtctccctgtcacctgcaagacaacattccactcccatgcacccggcctcctcagctcgccccagccctcacactccaaggatcccttctgccctcgcacctgcccggagacctctgctctacttccacagctcaaaccaaacactgtcctaagaggccccctgaccctgctggacatccctgcctgcgtgccctcctctgcagctccagctttcaggagggaggacacagcctttcttattaaaaattgtaataaagaggtgtccaccttcagaactgcactgcagggcgaggcaggcagggtgcccagggcacaaaaactaaggagacgcccaccacagataagtcagcctgagggcttgggcatgtctaaagatggcagtgggctgggcacagtggctcatgcctgtaatcccggcactttgggaggccaaggtgtgcagatcacttggggacagcagttcaagaccagcctggccaacatggtgaaaccccatctctactaaaaatacaaaaaaaattagccaggtgtagttgtgtgtgcctgtaattccagctactggggaggctgaggcaggagaatcgcttgaattcaggaggcagagggtcagtgagccaagatcgcaccactgcactccaggctgggcgacagagcaactccgtctcaaaaaataacaataataaataaagatggcagagggaagtttttttagttttgaggatttgttgctacagtttttgtggaggacaaaagaagcctttacaacacaggacgtaaagcagggcgatgtcctcctcagctgtcttctctaacaagacacactgcccagcctgggcaacatggcgaaacccccatctctacaaaaattagctgggcgtggtagtgtgcgcctgtagtccttggctcactgcaacctccgcctcctgggctcaagcgattctcctgcctcagcctcccaagtagctggaattacaggcacacacaactacacccgaacaagcctcaagcctgctcagagccccatgtggttcagatggtggcagcactttctaggagctcccagagatctgggaagcggggtggcgggaggacggcctggcactggactggccagggtgccagcagggacctctgtgcaggtggcccagggagccaggctggtggaagaaactgtctcccacaggggctgccagggagaaaccgcagggaagaccctgcctggagtcccagatgggaatgcccaccctgaactggtgccatctgagttgccttgtagccaggcctcagcccagtaaggacctggcaacaccagggcgttcaggaacatggaaagggcactcaacccaccggccaccccctcaccccgaattaaagcctcccatggcctccttgggatgtagcacctcagaggcccagcctcacccagccctctccccctggcacccccagctcagccccgctactgggtcacccttggttcaaccaggcaagccctccttctcctcagagcccatgtgccgtctcctctgtctggaaaactgacgccaacactcccaggccaggtcaaatgccatcctgtgcttctgtggtgccaggggcctcctcttcagagcagctgcttagatgtccctcttggtcacctcccctccatgcccccagtaatggaggggggcaggaggacacccccaggggctagtaggactgactcagccattgtccaactggaaccactctatgtggggtggcagtgacaagtccagcttggtgaggacaggtcttcccacaggagcgatctgggcccagaggaggctctgtgtgggtgaagccagaacccctataaaacctgcagagacacgtcaccccctccctcaggcaggacccagcaccagggtgtgtcagggccagggaccctgaagtgggaaaacttgcgtcagctcttgtgagcatccactctgcgagcgtgagggcacaaggtgggaacccgggggcttcccaagagaggtgccctgcctggagcttctggcctgggaggcgcacaggccccacagcccagacctgcgagacaggaggcaacactggaagggaccactgcctttattgcctctgtgctggggtcccagcctggggttcagaggcctctgggggcaataggtgaccctggacccaaattattgctacttggccaggtcaccttggggcttcccatactgccctgagaatgggtgggatgagggcatgcaaacgatatgcaaatgacatgcaaaccaacccagaggcctctggcacatccatgggtgctggaagagtcagagcctagtggcctgggagggcgacggggcacccagctcaggcccagcctcggaggcaaggtttgagggttggggggtccctgagcatcagccctgcttctgccgctggctgaggaggagcagaagcctggtcccaagacagcaggaagaaagcaggaccctcgctaggcggccagatggcctgaggcccacccagacagggacgggacctgccctgggtcgctcagccaggcagggacagcagggaccagaatccaggtctcctgagccaggcagaagccaaagtagcttggaggctgaagtgacaaacaataaaatacagggataaataaatcaataataaatagaaagcaagcagcccagtccctgatccctgggctgagagcccttccaccaggcccaagtccaggaggagacaagtcctggtctttgcgctgggctggccagtccagaaggctccagagggaggcaggcagggtcccggggccctcggcgtgtgcaggtctggctcagttgttattcattatccaccaggaggctgggggtcagaggcagggggtcaggagccctcaggagcccactgcccctccagggccacagtgagtgggggtccaccgcatacctgggaagaacacagtggtgagggtgtccggggcccgcaggtggtcgatgaggatgcgctggaaggccttgctgccaggcgactgctggtgcctgcagagacccaggctacagtgacctcgctctccccactcccgccccatcctgctgccaggatcagaccccggcccttctcacactgcctctggagcctcagtcctctcccctgtgacacggggaagctgtgtgggtggaatgaagggcactgcacacggtgcttggcataggcattgtcacatacatggtgacaagtgtgtattcactgagtgcctcctgtgtccctgtgctgtattcagctcttcccagtcacctcctttagcccataggagttggaactgttatcacttccattttggaaaggactcgggggctcgggcaggtggggtcactcatctgaggtcacagagccagtgagcgggagagcagaattagaaccctggcctgactcactccagggccacattccatggtgttagcggccagactggcactcataccttctccaggaggcctcatcctgccagaactcatacagggtgaaggaggcaccgtccagcatcttctgggcggacacactgtagggccaaagagatgggcaggccaggccagggctgccaccacctctgcctccccggcctggggcctcatgggaaccctgacccacccaggatggccagccccagcacccctctctgctcaccccctccccactggccatcccacctgccagctggggactcactgcagacaatggctctgggcccctgtgaagtccacatagcagcgcagggctcggtggaagtcctgcaggccttcctctgccacctggacctgcctctgggccatgaggatgtgctggtgggagaggcagccggtcagctggtgcggggccgggcacaggggagggactggctgtggcctccaggaggttctcagctgtttttctgtttgtttgttttttaagacagggtcttgctctcacccaggctggagtgcagtggtgtgtgggatcacggcttactgcagcttctatctcccaggctcaagtaatcctcccaccttggcctcccaaggtgctggaattacaggcatgagccatcacacctggcccctagccttcttgactgatgccagatccaacctaccctttagctgggttcctgccgccaacctgccccccagcctccctgtctccatcctcttctccctgtctccaagggtgctgcttgatccagccactgttcctcctcctgcagtatgccaccacttccttccaccctccagcttccgtccacactgccccagacctggctttcggaaatgctgatggggaaccaaagcccagagaaaggtggtggttcctgcaggttctcagaacccggcacctgcttgccaggcctgggggcggggcacatgcgcactgcagagggttggtgggcaaccggccccatgaatccccaattcatgagcacccccagacacggccatccagccgcttgcccctctcctgggctcaccaagtcaggccccttggccaggtcctcttcacgcaggggttccagccggggggcctgtgagggcacagagtgtgggccgggcctccagcatgggcctggctctggtggataccaggagggtcctcccttgtggggccctggccccacggccctcaccttgcactcgagctggtcgatgagctcctggaggcggttcacctggagccgccactgcatctcggcctctgagctgcgccctgtgtgtggggcccgtgcagggtcaggcaggggcctctcaggtcccgcaggtgctcagaatgaagtgaggggcagtgaaggagcgggccctgggggaaggggggatgcggtgcctgcctcggccaggcctcccaccccaccccaggcgcacctgtgtcagaagagccgggggaccaggtggatgaccggctgacactcctcagggctcggcgtcctgcccgccggctgccgcagagcctgctctgcgcctccacgctctctgcatctgacctagaggaagtgaggctcacagggccgaggactggggccccaggacgggataagcctgggtggggaagacaagcctcctgggactccgaggcctagccccaaagccagtctcatttcaccccgccatggctaccctgccatggcttccccgcccgaaaatgcaggctccaggatgctgggactgtggggatttggaatgggggtacaatgggcgcttgtgcactagccccacaggttgacagcacccttacataccgccagccatgggcctgggcctccagggtatctgacgccccctccagcgagctctgaagggcttgcagctggctcaccgtctcccgcagcaggaagcgcgtcacaaactggtccactttggaggccctctcgtactcctgtgggccaaggagggacggtcagcatctcccagcccgggcactgatctcttgagtgggtcccctgcctcttgcccatcagagcagcggtggcagtgccaagagcaggggcacgcaaacctggcacaggcaggagggtactgagacctgatgggcagggagggtctggatccctccttgtccgggactggcctccctccccggaggtgtgaggccaactcacagggggcatctgcccagcgaagtgcctggcctctctggacctcatggccccttccctgatggggctaccaccttcagcactgtcatagccagtgagtcccagccacagctaggctgggtgggggctatcacgaggtatccaagggccaatgttgacacaaggcaaaataatggcgtggtgtggccccagactcacaatctacgtattcactcattcattcattcactcatacacacaacactgggtgctttttactaggagctgctgataaaagacaatcaggttgccattctcactcagacacacacgccggcactgaccccaaccgacactgccagcctcctcccagcccctctcagggtggcagagaggcagggaggctgcccaaatgctaggccctgcatggcccagcatgggattctgaggctcctcaacaaccgtcagttcctggagcttccatttcctcatctatcaaacaggaaagatgaaactcagcacatggagctgcaagaacgtcccaggagttaattcctgcataggactcagcccagggtctggcacgtaagctctcgatgccagacctaccagccatctatcgtcaagtgtaatacaataaagggcctgcccacttgtacacccaggagtcacagatgtcctgagaattgcctaacccctaccacacacacacacacgcatcagggtgggagtcctggggagctgcagtccaggtgcctgccctctccgaggagactccagaagccccatccatcagagacttcatctcctgccatgacctgcctcagctcagccatcggatgggacctcctgggccaggcttatgagctaggagacagggacagagaagaggctgggtcttttcattctcagacaggccagggtttctatctccatgaaatcttcccaaaaaattcctttttgggtatttgagatgattagtttctgttgctttcaaccagagaacagacagaagcacccactcagagccaagcactactgcaagaagaatttcatttagtcttttgtttttctgagacagagtctcactgtatcacccaggctggagtgaagcggcatgatcttggctcaccgcaacctctgcctcccagcttcaagcaattctcctgcctcagcctcttgaatagctaggtttacaggcctgtgccaccacacctggctaatgtttgtatttttagtagagacggggtttcactatgttgcccaggctggactcgaactcctgacctcaggtgatccacccgcctcggcctcccaaagtactgagactacaggcattagccaccatgccaggcctcatttaacctttgtaacaatttacaggaaccataattgaccccattttgcagatgagaaaacaggtccagagaggttgattacctgggctaaggtcacatagcaagttagtagcagggccaaaattcatacccaaaccacagaaatccccctctattcaccactaagcaccttacatgcattgcctcatttatgatcattagcccagttttacagctgagaaaccaaggctagaagtgactgagtggagcccagattcacctgtgggccctggaaggcggtgctcagagcctgcaattggtgaggtcagcccgtgaggtcacaatgttgccagggcccagggggcagagcagacggagtgtgggccatcgtccccagtggtgaccagccctgccatgggaaactatagttcccacaaaaggaccaaagcacccaagcaggcccgcaaggagaggccggctgacatggacaaggcctggtggaaatcgttcctcaaccacctcactcggaagaagccggctgtgagggcgggggatggggagcagggctggggaggcagctggggggcagagaaagctggacaagtgggtgggaagggatgctgggagtctaggccttgtatgcagaagtcctagggggtgagggaggaattcgaaaatctctcccaaggatgaggatcccaggagcccatatgggtgtggatgggggtcctttcaaggtggctcacgcctgtaatcccaacacgttggtaggccaaggtgggtggataacttcagcccaggagtttgagattggcctgggcaacatagggaggccccatctctacaaaaattaaaacttagctggttgtggtggtgaatgcccgcagtcccagctactcagaagactgaggtggactacgtgagcccaggaggtcagggatgcagtgagccgttgacagcaccactgctccagcctgtaggacacagcaagaccctgtttgactcagtcttaaacaaaaaaagcccagaagggagggcagagattccagaaccagaaagtggatgagacttgagagccccggggggtgagcatgagtgggattctctcccaaccctggacgaacgggtggagatcccaacacggagaatcagttctagttggtactactggagctagaggcagggggaattccctagtgtcctctcttcagctcctaggctcagaacttccctgtctccctctcaaatgagcagaagccctggaccaggcgggggtgggaggtgctgaaagcccctgacatagggcctggaagggatctcataaacttagacggagctggtctcaggaagtcagcctgggatggatgagggtttccagaaaggaggcggagtccggggcgccacgcagggaagggcgggcttccccgcggcctgaattggacaggggtcccctccagccctgtgcacgagaggatgacaggacccgggtggacgacaggacccgggtggacgagggtcccaggagaagcgcggagcggccccgggtcgtgggctcggccctagcgcgctctcccgcctcacgcccctgttccacccccagaccaggatcgtgctgattctccccctggacaagcggcagccgctggccaacgctgggcaacggattgactacgcgtccggcgctgggctgggctccccggcggcacccagattgcgcggagcgggcgaaggtagcgagcgcgagccgaggatgccggtactgctgctgctgcggcggcaagaggcgcggcggccggaagagggcggggccagggcagctctgagctggccgcggctgctctcgcgcttccggtccccggggaaggctccccgcgaagccggccccgccgaggagcagccgcgcaaacggtgccgctgccctcgcccgcagctttaaacgcttggcccggaccccgcccaataaagagtgcgtggcaaccctggcgcctgcgaaccctgtcggaggcgtctgggcgcggagtcggggtgggcaaagctcagcctaggagccgcagaggggtgaacggggcgtgatgaaggcagagccatcgccacggtctggagccagggctgtcttttgctttctccttccttgtgccaagggtcagaacagaaccccaaaccttgctacagtggcgggaggcagtttccttcccccaacactccaaatccaggtcacatcctgcccagtctgcaggctcaagggaggtgggcttgggcaaacccaggcttggccacgctagtgagagggacctgcttccggtaaagcctgacatccccccagcatccagaaatccctcttaggcatgagggagggttcccggccaacaggcaccatcctgggtaagaacagccaggatggcagtcagctggggcaaggcctgagacgtggattctgcctggggacgcacccaggagaagctggaagccctgggcctctctctggcccctcactcctacacattgtgcttggtaaccccaaagcattcaggccccccagtcttccccaaggcacctgtctcccaacctaccctgtcccatctccttccccacgtgacaaagactaattccaaaccacttacctgtctagggcagctcactcccctgctcataagctttcaacaggtctccattaccaacagggaaaaagcccacagcttcagtctcactccccaaatcacttagaagaagccctgccacactttctgtgggcgggatcctgctgctgcttctcctcactctcccgggtcccaaatccagctccacacccaatgccacccctggcctgccaaacctgcagcccgccttcctgccacactctggtgaccaacctcaggatgccctcttttgggggcagatgcagcaggactgaagtcccagctcactacagccatcagcccagcttctgctgaagatgcacttttgtcaccgccaccaggatgaacatctcctccaccttgcctgcaccaggctggaggctgcaagagctataacatcactcctgctaattgtgagaactgactcttccctaccatccacatggttacaatcagggtaaccatgttcttccatggggctgcacctcctgcccatacagtgattggcccaagctggtcctgtcagcccctccccctaggactgtgattcaggagctgtaagagaccatgttctctacttgaacatgcacaggctaagccagccttcagaataaaaacacaatgcaggccaagcgcagtggatcacgcctgtaaacccagcactttgggaggctgaggcaggcagatcacgaggtcaggagatcgagaccatcctggctaacacggtgaaaccccgtctctactaaaaatacaaaaaactagccaggcatcatggcgggcgcctgtagtcccagctactcgggagactaaggcaggggaattgaacccaggaggcagaggttgcagtgagctgagatcacaccactgcactccagcctgggcaagagagcgagactccatctcaaaaaacaaacaacacaatgcagtgcacatcctgggttccccacagccccgcagtcagattctgttcctgaaacctgatttcacccttgctcttgatatccataacatgtaagatcctttcaataaagtccttattttgggttacattcacctgagtcttctacctgcaaccaaactggtcctcaggaggatgaggctttgcagagacaagaagtgacctctttcctgtgtggggggattattactaccttttggaggagaaaaccgaacccagagaaagatcaagacttgcttaggactgcacagtgagtcagcttcagaactgagtcttgctgggtgcggtggctcacacctgtaatcctagcactttgggagtccaaggcaggtggatcacctgaggtcaggagttcgagaccagcctggccaacgtggcgaaaccctgtctccactaaaaatacaaaaattagccgcgtatggtggtgcatgcctgtagtcccagctactcaggaggctgaggcaggagaatcacttgaactcggaaggcagaggttgcactgagctgagattgcaacgctgcacgcccagcctgggtgaccgagactccgtctcaaaaataataataataaaaaaaagaactgagtctcaaactgaggcccacgtgaatccatccgtggaagcccataaaggtagggccagagcctctcgggggctcttcagggaagctgcagatctgtgatgaaaaagctttttcttcagcactgggaggggtagggggccacacatctggacagagtacatcagataattctaagtggtttgggaaaggaatcagactgtgctgggctgctgaagccagacccctggatgccaaaatcactgcccttggctctgtccagaagagaggatgggtccagggagttgtcataaggtagggagctgcgaagtgcagctgctggggagtgaggtcacaatgagcccaatccaagttcttttctgccttctgaccagcccctcccctctccacaaccaggaacttccgtcaagcccaggtgagaggtgccaggaggctgcctgggtcctcaagggggatatatgtccaaatggccttaccacaaggccccttcgccctcaaagttctgctcctcccgggggcttcttaggatctaaaaggatcagtcctagccatctcgtcagccatctcagcaagggctgacggggcggaacagcaaagcagaggcgggtcctgagagcgtggagcctgaagcccggcgccagagggagaccaagagggtgagatgcggctggaacccagccagagcggagactgaagcctgaactaggggccgggcctcaggcctaggaactagccacgagctgaaaaggaggcggatggcccggacagaagaggcggggctttcagaccagagggcggagccaagagctgaaaagggtggtgatttggtccagaagaggaagaacttaggctccggaggcagagccaaaggctgaaggggactactccctaggacagaggccgggaggtatcgggccgacgaagccgagtggcgcggaggagcggagccttcagccccgcggctgggccgagcccgaaggtggcgtcggtgtcggggagccgccgcgtgcaccggccgtcctccctgggccgcatcgcggtggtggtggaccagggctcgggcttcaccaaggcgggcttcgcgggcgagaaccagccgcgcatagtgctgaagagctctagcttggtgcccagctgggaccggccggtgctgcccggagcgccgggctgcgagctggcgggcggcgtggcgcgggcgcaccccatcaagcacggcgtggtggcggactgggaggcgctggaagggctgtgggagcgcctgctggtgggcggcctgcgggtgtgcccagagcagtggcccgtgctggtgagcgactcgccgttggcgccgcccgcgggccgcgaaagggtggcggagctgctgttcgagaccctggcagtgcccgcgtgccacatggctagcaccgcgttgctggcgctctgctccaccggcgcgttcagcgggctggccgtggaggcgggcgcgggcgtgtgccacgccacgcccatctacgcgggtcactcgtggcaccaggccaccttccgactgaacgtggcaggcagcaccctgtcgcgctacctgcgggatctgctggtggcggcgaaccctgacctcttgcagcaggccctgccccgcaaggccatcacacatctcaagaagcgcagctgctacgtgtccctggacttcgagggcgacctccgcgaccccgcccgccaccatccggccagtttcagcgtgggtaacgggtgctgcgtctgcctcagcagtgagcgcttccgctgccccgaacccatcttccagccgggcctgctgggccaggctgagcaggggctgcccgcgctggccttccgggcgctgcagaagatgcccaaaacgctgcggacacgcctggcagacaccgtggtgctagccggcggctccacactgtttcctggcttcgccgagcgcctggacaaggagctggaggcgcagtgccggcggcacggctacgcggccctgcggccccacctggtggccaagcatgggcgtggcatggctgtgtggaccggcggctccatggtggcctccctgcactccttccagcgccgctggataactcgggccatgtaccaggagtgtggctccaggctgctgtacgatgtgttcaactgagtcaggctggactggggggggtggcactgcgttgggggacagctctctatctaaagagtcaagtgtttggagctggcagggtcctcctggaggttggagctgactggatgggtcacccccataccctttctgggccaggagaaggtatttgggacccatgggaccctcattttgaactgcagtttgaatctccccaaccactgccagttcagagaatgccagtccagctgcctacccacagggccctactttatggcaataaaggtgatgccccacttgtgtccatgccacagatatgggagttcctccaaaccctcgtcatgtaccatttggacatacatccgatgccaggccccaaggggcgatcccttgaaaagctactaaatctcatgtgaaagtcaccaggaggaggagccctgtgcctagccatgtgctcaggtcattgttgactatgagtgcctcagtttccccttctgtaaaaagtggggtcaggcacaatcccgggcctgctcactgctccctcccccttacaagagctatggagcaaagggaggtggagatatttcttgaacacacaaagggaagggcagcttattttttggaagtcaccactcaagggcctcaagccctggctatcagcactgttcgagcttgtgtatacacgtgtccacacaaacgcgtgggtgttcacgtacctgcctactcacgtatgtcctcgggccaggccctgccctgtgaacctgtgagcacagccttccacgcctagcccagccctgaatgatatcccaccacagttgtgatgggccagcaactaaagcaacagcagcccctagtatgaagcacccagtgtatgccagacattattctgggtgctggaaacagaataaaacagacaaaaatccctgccttcgttctcactggtcacagtgatgtatgaagggcagctctattgttatgatggtttacagatgaggaaacaggcccagagaggtcaaggggcacagctacaaagtgggagccaggatttgaacccaagcccctagctctataaccctgagtcaagactgtggaggatcccacagcacagcagatgcccactgcctcacagtggatcccccaccatcagccactccactcaccagcttggtggcatccatggcagcgagcactgcacggttcagcgattccaatgcagccagcaccggccggtagacacccaggtgctctgagaagtagtctgcaggcagaagaggtgctcaagggttcctggacccccacccatctacccaccctgggattctggccccctggaattcctcagcagccaagcaggccttatatcctgagcccagcccaacctgtcccatcaggagaccagcaacagtcccttgccacacgtaccctggggcccaggggccacaggagaaaagagctcccatgggcctactcaccacacagtttttctgtttctaaattgctgcagggaaaagagaaggcgcccttcagacctgggcctggtaaactgggactaatggggccaatgccccacatcccaccccaccaactcccagcttagcctaacaaggccacttctgctccaccccagattaagttgctcctgtggacagagtccttgcagggttggagaatgggttctactgcccccaccaatcactctaagggcaaagattcagacccattcttggctaccaagaggatctcaggccaggggaagatggatgtggacacaggccagtgagaagtggtcagagctgcgaaggggaagccaggtgcaaggcaatgaagtccagggacggcatggggtatttagttgtaggttagggagggtttcctagaggaagagctgcctaagtgaggccctgaaggacaaggaactgggtggggagtctggccaggaggggaggggaagcactgcagatgaaggttccagcccaagtctcaggagcctgagactgaccctcaggaaaggggagaagggaagtagagggagtaacagcggttcatgcgtgtgcacccctgggagcaggcacgggaaggagcgtgcacactcctgccaagacgcgtagatgtgggagcacacaaggggtagatggttgcgtgtttatgcactgcattctcgggtggaagcaggcggggcccagctgtccccaggcatcctctggtccctgtgggaagcgggaatggggagctgagccatgggtggtgactcagacttggctattttggggtcccagctggaagcagtgtagtgggcaaggctgtagctggagagggggtaggcaggcgggtaaagttggaactgagccctggtacctttctccctgccccctcttcctcatcctacaaaaggaaccaaggcagcaggggacacagtggggtaaagacaacctggcctcgcatctacccacggccccctctcatactcactcggtgagatgcccatcaatgccgctgaacagttcctgcagctcccccaggctgagaaccccatcggcaaagtaattctggaattcctcaaatgagagcttcccatcatctggggtggcagggggaggacagggagcagaggaggtatccctgaccctgactgcacccctgccaccaggtccagggtcccaaaggcctcatagcatctgacaaccatctagctaggtgagatgggagtctgaggtcagtggggggcctgactgttggggacaaaaggactggggtccttgaaggtgtccagtgaaggcaacagaacctactttgcaggcaccaaagggacagggcagtatgtacatagcgttgggtaggaactcagtaaatgtttgccaagtgaaaaaacaagcaacaggctgggacacggccacattgtggcagggcctagatgtcacctggaaggacttggggaccagcctcactgcagggcacaaggaacctccattctctggacccaggaccttcacagagaagccacggggaggcagatggaatcctcctactagttggagcctctgtaggcagcagcaggctggctcagaagggaatgagctccccatcacaggggcatgtaagcagaggctgggagtacttatgtgggacaaagacatgggatttggcctgaatgatgtgtgaggtctctgagcagatgggtgcggggagctgacccgggggaggatctgaacctccccagacagaactccctggtccaagtgagagcatgtgtcctgatcaatgggttgggacaaacaatccccatcaatttgaagagacccaaggagaaggggcaaagagtggggacaggaccccgtctctaggaggatgaaacacaagagggcgtgaagacccagatgaaaggagccccaggctgactgcgaagctcagaccctccacgggccacacagggcacagtgggctgctccaagtcatctagggggagcagcctgttgctggatgggtcccctagggctcctgctttagcttccaagtttctcccagaccagggtctgagactgcccaggacccaaggcaggaggagccgactcctttggcactggacccagctttatccttgcccaaggcgtgggtttagttgtgtcctccaagacctccctggtccagatggttggtcacatgacaagttactgagccctctaaaaacctgagtaaaatctccaaaaaggcctcatctccattacctcactcttccaagtgcctcacacaaggagcctgggattaaatgctgcaaagacccaagttcgagcctatcaattaaaggctgtgtgaccttaggcaacttgcttcacctctctggccctctgctcctttatgaaatagggtgaattccaatctagctggtggttgtgaggacaacagagggccacgtacaggaagtgcccatcaccatgccagggtgctgtgtgaaagtcagcccctatctccagtccgtggccaaaccacattctctccactctccatcctgccaaacttggctgagaacagcacttcctctgggaagtgccttgattgattctcctgttttgggcccccaagatttgtctcaactcttgacttcccacccaacctcccaactctccctgggcctcctggatgcctcccaccctgccccactgtgggacccaggggaagccacactcaccattcttgtctgctctgcggaaaacctagaggacaaagggacatagagagaactgtgagtgccacctgggaagccagaggcccccactcaacccgacagggtcccagctggccgacctaccccctgcctcgcctttcctcccgcccagcctggtcccaaaccacctgcccagctcagccctgcaggagcttttcctgcaagcggggcacaggaagagcacgcagcgggtgccacctctgctcacttctcctgcagggcctggcctcgtggggggtgctcctggccagtcccctgcgtccccacctcccacacccagagtgcagcccaagttctatctgatacatcagcccctggcacagttccagcttgaggaaggttgaggagatgggccaggttgtggcccaggaatcttgcacagccgtcctagacctgagccccgagctctgctgtgtggccatggtctaccccagctgccctctctgagctgtttccttgcgtgctgttgaaaaccaacagcaggcagtggctactctgtctctgcaggcgcctgagttacccactagcaaatagatcaggagcagctggggttaactctttcagggctggggcttcctatggggctgactctgaggaccttcggcaggcgtgtgtgtacacacacacgtccaagggggagtgggggtggcagaaggcaagttcggcagatttcatttatggagaagtggagatgaagagcaacagaggcagagaggagcagagtcaagacaggtccccgtctctcttagtgacctgctcccaggtcacccaaagcagcccagcaaaggggagactggcaggcctggcaagcaggggtgggccaagcctgggccgagagcccccatgaactccaggtcctgaacgccagccccctccagggtcctgttttgtcagggtcagtggggctcaggaaagactctaacctctagcctaactcagagaaggtctgccactggctgaggggcacgcagcaagccagggaggcccaggtagggtagatggagatcttgggagtgggcaggggtgctaagctgggaatggggacatctggggtcaccctattgtatccctgcctccatgactgacctgagacatatcccctcaggccttggttttcctacttgggaagaaggagggtcaggtcccttccagccagggctgtggtcaaggtgctgagtcactaggggcagtggggagggggtgggagacagctttgcctccctctggagttggggcatgagggggccaggacagagccgagcacagcggtgaacggtggagaaagggctcagggccgtggctggtgcccatggtggccgcagggccacccatggccccatgggagggtgactctgagcagcccttaccaactgtaggactctgctgccctggagtggggcctgaagaactctgggggcggcactagagtcaggagtgaggggcccttgcgtttccaggctccccttccccagtcagcccagcctggagctgccacagagtggggtgaccgctgctgtgattgtcgccagccccccgccaacaccagacacacaaatggggtgggctgaggggtgggaggcagcaggggcagtgacactggagcagggacaagaggagacatggagagacagaacaggtcacacaagggcagaaaggtcaagagaaaacagcagggccagagagaggggaagagacccagaaacagcggcggggcccgaacaaccccggagggtgagactaacagagactcgggtagggagacaccgcgagcagagcccgcgcccactcacgtcctggaagagcgtgtgtccggcgggccccgggtcgggcgcgagctgggggtgccgcggggtctggggctggggctggggcgcgggcggccggagcaggcacacggtgagcagccccgcgcacgccatggcgccgccacccgctcgggctcggctgcggttgctgccgaccctggacgccgcggcggactcggtgtggctagaggccgccccttggcgccggcgccgacgcgcgggctcaggccccgcccccgccccgcccccgcggacgccgggttccctcgcctcaaggtccaactccagcgccgcgggcctccgcgcttccgcggccacggcggagggggaggcgcccgagggctccggtcccgcgacggcctgtcgggagcagaacctaggggctgcgggcctacccagagggacaggatgaccaagccagtgccgaggtcagggtgacacaagtgggtaaaacccaccaggacttcaccttttggggcgtctgtatcctcatctacaaaaatggtactggcagacaccctatgcaattgttgggactcattcaatgtcaagtgcttacaacgggggctggcgcagaggaagcccacaggtccgtgcggccgaatcccaggcatcccgacgcccgccctctctggcactaagcgcagccctttcccctcccctccgtgactctggccctcccttcaacccgttctccacacagcagccggggggagcttttaagatgcgaaagaggaggtgtcacttcggtctccagtgactccttggcccctgaataaagcttaagactgaacgccccactccaggagcaccactctgaccctcacctcaggaccgcagccacactgctttctctccggtcctctatcccgctccctcctgcccaaggcctttgcccatcgtgtcctctgcttggtgttttcttcctctggttaactcctacttattttacagcgctcagcttaagcaccacccattccagaacgcctttcccgattttctcatttatgcagatctcctctttcagaccctgagagcaccatgaaaggaggtaacacccgtgtccccagaactgttaaatacctgacacagaaccagcccactgtatttgttacatgtttactaatgtccagaaacgtctggaaggaagacagcaaactgagcagagtggcctctggggctggggaaaggagaggccactcattactctgcacttcgggcagcactgaatagcattcttggctttctacaacaaaaacctttactggatctgcttttgagttaggaccaaaacagcgaggaagctgacctttcttcgagttatgaggctcaaatcaaatcgggcacggacagggagaagggaagtggagaatgggcatttccccagcaaccttggcctctcccgccccgaaatgttcccaacagagtcccaaaacccggcccaaacgtcatcaaaatatttattaaaaccaaagcaggagggaacagagctgttaggaagcaaatcaaagtgcagattggagggtggggcagagcagtggggaggcaggcgcttcagacactgcaggagggaccacagggtctgggctgggggaggccttcaccacccctcctgcccacatcagtgaaggtcccccactcacctctcccatctcatatccatcctggggggcagctggggccctgaactggccccctggagagggcccaccccaccatctgaccacccatggctgtcagtcagtctgtctccctccctcactttcccaataaataaatcacccaggcctcagttccttcagtatggggcagaagaacagctcagggacccctgcccttgctcaagggtagagggagttggggtatcaaccccacacccctcctcccctttgctgattccccaggctcaccaaagaggcctcgataaataaataacgctccattaaagcttcaatcagaaaaaacctttaagacagaagtgctctcaccgtcctacacgcccagccagccaaagcctccccacctggcctggtcagagcaccagattctgggagcaggcactgccctgggccttgtgggacccccagagcaaaagggccgaaagtgcagttagagcccccccacgcgcacacatggactcatgcacacacatgtggacacactggggcgtgtctgcagtgcacacacagaggtgtatgttcaccttcattccccggtacatgcacacacacatgctcacacacattcacccccggtacacacgtgtgggtgtaggctgcatgcacatacacaccacacagactccttcccttcctggcttgctcagcctcctagcggtagccagaccccagagctagaagcttctggagacagaggagaggggtataaattaaatgtttccaaacaggctgggaggacggccagggacagggggctccagggctgcagagacaaggtgagcatctctggaaaccctggtccctccaagccctgtcagaaatccaggggggtgaggtccccaaagtcacagtcgaagaggtctctgatgccctcgccctcctcgaggccgaagtggtagtcgagggcctcgtggggtggggaaaggctgatgaactcctcagggaggaggccggagaagtcctcccgcacatgctccaggagcgagtcggccgccaccagcggggacaggcggtcctcgtccacgggagcccgcaggctgcccatccgggacaacagcggttctggggagacggggagcatcacaggccggggatgccccagcagggaggaaggcaggggctgtcgtgcctgcccaccccccagaagaggggccctgccccaccccacccacctacccatcacccaccttgctccaggctgagtagagactggctgggatctgtggtgagggatgaggggggagatgatggtggtggtgacactatggtggcagagtcagtggccctgttctcctcctcagaagtgacctcctgggatggggtcttcccagggctgatcccacctacggtctcctcagggcacaggaaaacatcgatcgggccttgtttgctcttaagggagatctgaaagttctgggtggaagcagcaggcagggtaaactgaggcccaggtgaccaccagcccagcccagcccagcccagttgggcccggagttcccagatctcacctccgaagagtccacggcttggagctgggtctcaggaggggctttgatcaccataaccatctgctctgcagggtctgcaatgctacgaaggtcctgacacgtcacgtaggccagggttggcagagtcaaggaccacatgacctttgacttctagggggtcactcactccaacagctcacaaggcagggctcacacctgcctagtcactcctgtcctcccaacctcctacccactcaaaacctacctcacgcctgagtttcaagttccacatctgtataatgaaatcactctacccattgaatcccaaggtaataatggctaccgggaacgattccatgtaaaatgttcaacacaactccaggcctggtgctgggaatttattttttagaggcagggtctcgctatgtcacccaggctggagtgatgtggctcaaccagagctcactgcagcctcaaactcctgggctcaagtgatcctcccacctcagcctcttgaagcactaggattacaggcatgaaccaccgcacctagccacttttcttttttaatctgtacaatttcagaattggatattattattccccttttatagataaaactgaggccaagaggttaagcaatttatccagtgtcacaacagtgagaaaatgctgagccaggacttgcaaccaaaatcagagctctctcttaaatccaagcctctctagtcccacttgggtggagcccctgcctgctaagcctgccttccacaccctacggccaatccaaggatatcgctggctgtcagtgtcctcggagagcaggcgcagctgcgtagtacagatattcatcaggtggtccagctgctgctcgctctcctgcagctgtcggaggtcctgggtcaacccctcaagccgtccgccgacgcccactgtggtgtggctgcccctgtggggaggcaccagggagggtagggttaacagcgattggcccctctggccaggagccctgggcctcaggacagagtctgctgttgcctctgttctgtgaggcctaggcaagcccttgcttctgtctgggtctggctcctcagctgggctccaaatcagagtgtcatgggcttgaagtctggcccgaatataaacacctacatgtccctcaaccagggcgggataaacaaatgatgggactgacatgccacgaaatattacacatgcacacacacatgcatttccaagacatgctgtcaaatgaaaaaaaaaaaaaggctgggcttggtggcttatacctataatcccagcactttggggggctgaggccagaggattgcttgagcctcaggagtttgagaccagcctgggcaacacagtgagactctgcctctacacaaaatcaaagacattagccagacatggtggcatgtacttgtagtcctagctacaggtacggagcttgagcccaggaggttgaggctgcagtgagctgtatttgtgcctccatactccagcctgggcgacagagcaacaccctgtctcaaaccacccccctccacccaaaaaaccacaaaagatgcagaatggaacgatctaccaaaaaatgaaacggcaggtgtatcaaagaaagggtagtagcatgatgactggcgcgaaggcgagagggggaaaataaaacaagaataaaatatctatgccagacagatctcaccgagggcatgagaagccaggatagtggtgacctggcggtgtgaggggttggcaatgactggaaaggggcacaagagaaccttctagggtgttgaaaatgctcttatcttgatctgaatggtggcaacccagatgaataaatatataaagctgcgcggggcgcagtggctcatgcctgtaatcccagcactttgggaggctgaggcaggcagatcacctgagatcaggagttcgagaccagactggccaacatggtgaaaccccatttctactacaaatacaaaaagtagctgggcatggtggcaggcgcctgtatccccagctattcaggaggctgaggcaggagaagcacctgaacctgggaggtagaggttacagtgagctgagattacaccactgcactccagcctgggtgacagagtgaaactccatctaaaaaagaaaaaagtaaagctgcaactgaggtggatatgtaagatttgtgtgctttttaccatctatcatctcagggaagctacctctcctctctgagcccgtttccccagctataagatggggatgcaggcagccacagtgggtattactaccagctcctccaggctggcatgggcaggtgtgcctgccctcctgtgtggccggtacctacagccactggatgtggttcttggacttcttggcaatgagctggatgccctcaaggacgttggtgatgtcatagatgcgccgcttctgcaccttcagcacctcggcagcccagttcaggtcgacgacaccgtcagccgagtggctcagcagctccaggaagcgcttggtggtcagattcagtgaggtctcatagcgtgacttctcccccggggatttcacacctgtgggggtgtggtcaggcaagacagggcccttcagcatccacccccacctccagccaggcctgccactctggcagtgcagggcagcaggatgatgggggctgggggacagccagctccttccccttggcgaggccaaccacagcattcttcttctggctggggaactcctcacccctcagggcctggagaaaccaagccaggtggccactccaactgcccatcagggtcctcagaggcctggctcaagcccgacaagccagacgttagcttgcaagcatgtttgtctgttcacatccctaacctgggcctggtcacagggggtctgcccagcccaagctccataggtaccttttcctggatggcggcctctgccccgagctggcccactgctctcggccaggtactgatggtcagtttccaggtccagcctccgcttcacctgtggcgaaaacgggaggatgcccagtaaccaggagtgaggccagaagagacctggcttaaggctgggtgcctctgggctaccctcgcctcagtttctctagcaggatgcctgagtgtgtgactgagggagatcagaggggacatagcctgagagtcacagtcctaccacacaggacattccattttcaccacttctctggggtctagcggtggatttaaaacacatccgcaaactttctgatccttctccttcaaaagatatagcctaattctccccttatgagccagacctggtaacttgcttctggggatgaatgaatggaatgtggtggaagggatggcctgtcacttttgagactgggtcagaggcgctggagcttcctccttgctctgtattgggtcacttactctgccatatcatatgggcactcaagtagccctaatgatgggcaagaaaccatggcctcctcccaacagcaacacttagtcacaacttctgttagcagccagaacccaaacactggctgaatctccagagaccccaagccagagctggataagtcttccctgaattcctgacccacaaaaactatataataaatgtttgttgttttaaggcactatttttttttcttttttagacagggtatcgctctgttgactatgctggagtgcagtggtatgatcacaactctctgcagcctagacttcctgggctcaagcaatcctcccacctcagccttccaaacagctgggaccacaggcgcatccctccaagaccagctaacttttctatttctcgtagagatggggtctccctatgttgcccagactggtctcaaactcctaggctcaagcaattctcccatctcagccttcactgtagtcgtgctgggactagtcagccaccatgcccagctaagccactgattacataggtcccttggctaaatcaccttctctctggtttttgactaatctatacgcatggtagcagctggtgctcatcaagttccttgcatccattagttcattccattcaacggactggctgtataaaaatggccccattttccagataaggcaactaaagcccagggaggcccaggaagtggtagagtcaggatttgtacccaagacggtctgaggaagaacccaagctctaagcactctggcttagttcagacactccaggattgggactgtcctggaggtctcacaggctgctcaaaagtacccggaccaaaaccagactgatcttcccctccaccatccacagggtttcctgagctagagttcctgacctgtcaccctcctcacatgcagctaccaagaactgctcatcaccacggcgatcaccaccttcccagtgggctgctgagcagactccacactggtctccctgcctctgctgcagccagtcctcctacaaaccttaccatgccgccgcccctgcttaaggccttcctccagctccccattgcctttgtactctcatctgccactgcttctctagaggaacccgagtcacgttttcccagaaatctagactgcccttgcatccctcccaccctccccacttcacgcctgctccctctacctctgtgggcagaaaccttacgcatcagctaggaggtgtcacctcttctccctctgaactgcctcaaacccaaccttttgccacattctgtctctccctacacatttctgcagatgtatctatctcaccctcagaggtgtctgaatcacttgagaatctatagtgtctgccatggagcctggcatcaacaaatgtttgctgaatgaaccccccccatgctgatgaaccactccctcttgtgcacattcactgacttttgaaggcacccaggggaaagaagagctgttgtgctctaagcactgtgtactcaactgcttcccctgcaaccctccggccaccttttggcaggtgctatgatggcctccacctgagagaggccacacagtgagaggtggacccaggacttgcaccctagttggctggtacagagcccacactcatacccgccacgtgccccacctccccagaacccagccagaatgtatccccctccatactcgcccctggggcccaaaccctagcatgcttctgccatctgcaccccttgccttctccctgggatccccacccttgtccacccctgaaggcaggtcagtgccacgccctaaaacaaaggcttgagtggatgccatttctgccacttctccctagataaacactggcagaggggccccgaaacgcaggggtgaagacattcactgctgaaaaaatctggatgactcgaacacccatccatgaagggggtcacgaaagctgtgctttgtttagccccttgaacaccacgcagctgtcaaggaccgaggcaggttgacaagaatcccctcacacatacagacaagcaaaacactgtcacagggcgatatatttatatgatcccttttggattaaaaagctcatgaaacttttctctggttcagtttatattattatagaatacatttcggggcagcctctggaaggactgtgggagaccagtgccatatctgaatggtgtgaatgatacaggaaaaactacaatttttaaaactttaaaaaacaaaaactgtcacaaccaccacaaacaaaaatagccttagggaaaaaaaggaaaaaaatgaatagggctgggatcctgccgtcaactttctagtttcttaagagttaagtttttggccaggcgcagtggctcacgcctgtaatcctggcactttgggaggccgaggcgggcagatcacttgaggtcaggagttcaagaccagcctgaccaatatggtgaaacctcatctctaccaaaaatacaaaaattagccgggtatggtggtgcacgtctgtagtcccagctactcgggaggctgaggcagaagaatcgcttgaacccaggaggtagaggttgcggtgagccgagatggcgccactgtactccaacctaggtgacagagcgagacttcatctcaaaaaaaaaaaaaaaaaaaagagttaagagttaagttttcagctgggcatggtgactcacacctgtaatcccagcactttgagaggctgagacagtcagattgtctgaactcaggagttcaagaccagcctgggcaacatggcaagaccctctctctactaaaaatacaaaaattggctgggcatggtggtacacgcctgtaatcccagctactcgggaggctgaggcacagaatagcttgaacttgggaggcagaggttgcagtgagccgcaatcacgccactgcactccagcctgggtaacagaatgagaccctgtctccaaaaaaaaaataaataaataaataaaaaagttaagttttctacattaaacatgtattatagttataatacttgagtttgtggaagtggacaggcagggccaagaggaatggctgaattgcagagccttgtatacagaatgcctgctggtatagaagctaagcctgtagcttatttcaaggactgtgccagacaaatgccagtgcagagaggccaaaagccaaacctgtggactttctggacttcagttccagaatggtgccagcctcctggcccttaagtacactgggggccagggctccttgtctctgggcctagtgcctcctgggcattcactaactcaacaactgttgaatgaatggaatgcccaggccaatgagcctgcccctgacaggtggagtggagggcatttttctttgcccctgtccctccctttgatcctagaacccataatcctgttcagatctttgaggacaagaccctcaggttgttagatttccgcagacctgagccttctataatgcttgtcacacagctgaatggaagatgcttgcccaggtcccaagtggtacccacaggaacaggcccctggagtacaggagacaggccacctggcccacccctggtacaaccccctcccacccactcattaagagggagggcccctaaaagcccttcttgccctttcttcaacctgtatcagcatccccagaaagcaaggcatcccagaggtcaacctcagaggaaacgcagactgctctccccactcaagagcagaatgacatgggaagattctaacatctctaggcctcagcttcccaatctgtaaaaagggactgctgctgatggggttaaatgagttaattaagtaaagcgcttggcacagagcctggcacacaagacatcctcaaaacaatggtggctgctattgttattattattagcattgtggtgattccggaaggcagcactgggcatggggccaagggggttgggggagcctcctcaggatgcctcagggaccagctgccacccacacccccatcagcagttaggcagcttctacctccttgtcctgagtcctgcctcacccctcccacttgctccaagttccctgctgagaccccatcctgcctggccagaccccgcctgcacaccagagccccaccttcacccataggctgcgccagtcaaactggtctccacaccctgccctgtgccccacagttcccagctccaggcttctacgcctccaatcccttctcccactggaattcagccgcctcttctgggccctccagtctgaattcgtcttgagctcagcgatcagggagggctttattaaaggatctccctgagacattttctctcctggcactgggggcctcctctccagctcccagaggcccagcccacctagtccttctacagagactcaggggtcggcctgcctgattaatgaggttccatggcaaccagggcctgggagggtggagggtggcagatggaaggacaggcagagggaggggatcagcagctggtccagctgccccgcccctgcagagaaggcctcccagccaggagggctgtccccagaggcctggccggccaggcctgcacctggcagtcagcatcgaggcaggaaggagggtctcctcaatggctcaccaacggttaggccccaggactttcctccgccccgccttcacttcccctagcagctgtgctcactaccgagatgcaaattctgagctgaagccagcaggcctcagttcaaatcccagccccaccacctgcagccgtgtgaccaggggcaagtcactttccctctctgggcctcagttcctcctccgtcagatgggcacagtgacaacacagctcacagcggggttgtgagttttagctggcttgaagtcgcccaaaggcctggcatgcagtaaacgccagttgaatacacgtgggctattattatcactgagtccgacgctggggaggctccggtgaggaagctgaggcgcagagcacagagcagcaaacagggaccggcccgaggtcaccccgcaccccagggcggggcccggaggcccaaccccggctctgcaccgcccagcctgggcgcctcagtcaacccctcccccgccccctgccgcctccaggccaaacacggcgccctcccgggtctgcgcggggggcacaggcggcgctgtcggcgcggcgtccctggggtccgtaccggcgggcggccgagcgcgggccgcggcgcactgggtgtgggccggggcgcctgcggtgtggcgaagagcagcaggtcagggtcgcaggggccggcggcgggcgccgcggggccggtgggagccggcggggcgctggcgtcctgcgcggcggagatgatgacgatctgcgaggagtcgagcagccgcagcgcgccggccccgagcagggcctccagcgccggcgcgcatgggccgcccgcaggggccccggccaaggccatgacgctcacggcccgcgcggcccgggtgacaggcggcggcggcggcgcgggcccatggcggcaggcctcggcgagggctcgatcccgctccgcccccggccgccgctgcctgcaaagtcccggccacttttacgcgccaaatcctttttgccgcgaaagagccacgagccgccgagcgccgccacaattggctgccccggccgtgacgggaacaacggcggcggttcctattggctttaacgcgccggacccggcggcgaggggcgggatggggcggcggcgcggggcggtacggccaatggcggggcggggcgcgcgcaggctttgtccggatggtaccaggcgcggtgtgactccccgcccccagcccgggcgtcccctgctggaggcgtggggacaccggaacataggccccgccccgccccgacgctcccgcatcccactgacctttctatagtgcaggttcagaacagagcctctcttctgcacgtgaccctcaacctgtagcccccaacagcctcagcttagatttccagagactgtcccctcttcttttcaggatcatcagttccacagcccagccatcagccacctcttccatcctcaacttgcctcacccatgacattatcctaatcctgcacccagccctatcccgctcacccagagcccaagctgaagagcggtgcctggaaatggcgagggggacgtcgggctttcctgcaagtcccattttagccaaaatctccaacagccaacgtatagcatctgcttgaactcattcattccctcactcattcaacaaacgtttggagagcttgctctgtgccccatcctcaattcgtggccctaaggagctcacagtccagtagacaggggaacagaaaggtaacagacgtttacaatacgatgaagtggcgtctgggcgcggtggctcaccaccggaatccctgtaatcagctggcggggtggatcgcatgagcccaggagttcgagaccagcctgatcaacatggtgaagacccatctctacaaaaaatacaaaaattagccaggcatggtggcgtgtgcccgtagtcccagctacttgggaggctgaggtgggaggattgcttgagcccgagaagtcgaggctgcagtgagctatgatcatgccactgcacaccagcctgggcgacagagcgagatcctgtctctaaaacaaaaaaagaaaacacatcacttctagggagccctcccaaggatttactcacttcctctattgcccactgctgcctctgctccaatgctgaccacacacactccttttctccatctgcctcccctgccaatctaggagctcagtagcgactcctcccaacactggtctggcccagagcaggcgctgagaaaggttatgaaagaaacagaggctaagccagaggctgcctagactgtgacaaggagaccacggttctgcaagggtggtccttaggccactggcttcagaaccacgtggtcacttgctaattttgggcccaccctggccctgccaatttaaaatctctaggtgcccaagaatctgcattttaacaatgccatgtcccctttccaggtgatatttgttattctttttctttttttttttttgacacttagggaattagaaaagccagtatcttattttttttttcctatttattttatatagacgaggtctcactatgttgcccagggtagtctcaaacccctgggctcaagagatcctcccgcctcagcctccagcatagctggtactccaggtgactgccacctcaccaagcttccaggttatttttatgcatactcacatttgaaagcaaactggtgtaccagcataatcaaaatgagtggtgcagcctcaaatcacagctcctgaggatgcttctcacccttagtttcaaatgggcacacagaccttgccctggccccttccagggttgccaggagaatgaaaagcataaggaattggaaagtgttttacaaactatgaggtggtttaggaaatcaggagttgttttcccctccaatgagtagtttctgaaattactcattgcaaatcctagaatgtatcatagctagaagggaccacagagaccacataagcctcttgctgtatggataggaaaactgaggccctttcaggagaaagtaactgtgaagccaaccagtgaccaaattgggcctacactgcattcccagccctgaggtctgcctgtcccccttccccatcccctctccataaagaagctgaggggtaggtcccattctaaacaaccaacgcaggtgctggcagagagcaagagaaaccagcacattcccattccagatggaaagagtgtcctttccctgcaccttcccacagggtcccagtaacactaacattcatttgtgtgaagccctctcaaacccaagtcattcaacaaacacttattaagcacctattatataccaagcactgtgctggtttaactgtggtggctggcaaagagagatgtctattattattgctccattttatgatgaggaaatttgaggccaaaagggcctgagtttaccaagtagatgaaaaggttatttttcaggcttggtgaggctgaggttgggggttttccaaagtcctgcccgccccagagtattcaagtacacatccaggtagaagtaggcgccctccgtcccacaatccttcaggtcctgctgaagcagaaaggagtgaagaccagcattcctagcatgaaactgaggaagagataagggccttctgtacctattaatacctacttgaaagcagaaaagcctgatagatgaggccccttggccctaagcctggcagctcctgataaggctgttctcaatgtcaacagttttcaaaaaacagtttccaaaaaatccacagtcactgggcagccacttccattgatgatctcctttcaaccccataatcccgtaagtaagcttgtttatccacatggtgcaggaaggaagaggctcagagaggggcattcatagctcaaggtcacacagcagaactgagatgagaacttcacttgtcccactgcaaaacccaggacctgcccttgccaccctctgtaaataccccaaaagccaggctcagggctgtcaagattataaagtgtagtttctaaagggtattatggtggatagtggcttggttcataggtgcttatttccatcaccaccttcaccaaccaaactagaggagttcgaggggatgcaatctgttgggcccacaatcctgtgcctggagacctctttcccttggttctttccaagaagcagagtggtgtagaggtgatagcatgggcttctaaatcaggtgggtgtaatcagaaatcttggtcaacatgaccttggacaagtcaattcacttcattcaatccacagatatttactgagcacctattatgtgtcagacattgtgctaggtgctggggacacagttataagtaaaacagacccctggaactcacagtccagtgggaaagttaggaattatttctctgtcactgcacagtatgcttgttaagaagtttgacaagtgacacaaataatttaaacctatttattccacaaacagcacctcccctaagcatacattcttagcttacaaaaaaacaaaaattcaccaaacatgaatatccagtcatgataaggaatgcataattgggagaaaagattctgtgatgacttaattttatgaagggcacagagatgtccattgttgagttgtggcagagggaggtggggagttttgcatctgcaacaatccctcaatgctaccctgactgacagtttactgtccctggagatattctgtcactgtgccagttctggctatatctgaacagacctcttgcccatccaaaaggcagtctaacatagaaacaagcctttggagtcgggtggcccccaaccctgtggcttcccgcctctgtgatcttggggaagtgattcaccctcttgaagagctttgcttgcctcatctgcagaacaacagataacagcttctttacacgatgcgtgtcaaagtttaagaaaacaaaacaagcagagtttgcaaactggcccccagatataactcaatttgcccatagaagatttttcttgaattatgaatttgttttaagatttgaggaaattggaaaataccatataaaaattaacatgtctggcttttctttctcttttcttttttttttttgagacggagtttcactattgttgcccaggctggagtgcagtggtgtgatctcggctcaccacaacctccgcctcccgggttcaagtgattctcctgcctcagcctccccagtagctgggattacaggcgcctgccaccaagcccggctaattttgtatctttagtaaagacggggtttctccatgttggtcaggctgttctcgaactcctgacctcaggtgatccgcccgcctcgggttcccaaagtgctgggattataagcgtaagccaccgtgcctggcctctttttttttttcttttgaaatgggagtctccctgtcacccaggctgaagtgccgtggcgtgatctcagctcactgcaacctccgtctcccaggttctggcaattctcctgcttcagcctcccaagtagctgggattacaggtgtgtgccaccataccaggctaatttttgtatttttagtagagacggggtttcaccatgttggccaggctggtctggaactcctgacctcagatgatccacccgcctcggcctcccaaagtgctgggattacaggcgtgagccaccacgcttggcctctggctttcttttcaaacagcagtatctggctatactggccaggccatcacggtgctaaacagttgttgtcccccagctagcgagggccttaccctccaggccaccagagtccttccctggcatgcctcactcagttcttgccctgccattccagggatgaacagccacccctcatgtacagtgcctggcacagagtgagcacccaaaaaatgtgagctgctgttagtcttattaccgccaaggaactgactggtaccagcacagcttctctgccttgcaagtaaccaaagataacatatggacaggccgggtgtcgtggcccatgcctgtaattccagcactttgggaggccgaggcaggtggatcatctgaggtcaggagttcgagaccagcctggccaacatggtgaaaccccgtctctactaaaaatacaaaaattagctgggcgtggtggtgggcacctgtaatcccagctacacaggtggctgaggcaggagaattgctggaacctgggaggcagaggttgcagtgagccaagactacaccattgcattccagtctgggcaacaagagtgaaactccatctaaaaacaaacaaacaaacaacaacaacaacaaaaacatggacatagaagagagggaaaagtggatattcgtggctgggtgcggtggctcacgcctgtaattccagcactttgggaagccgaggtgggtggatcacctgaggtcaggagttcgagagcagcctgaccaacatggtgaaaccccatctctattaaaaatacaaaaattagctgggtgtggtggcaggcgactgtaatcccagcaacttgggaggctgaggcaggagaatcacttgaaccggggaggtggaggttgtagtgagccaagatcaagccattgcactccagcctgggtgacagagtgagactccatctcaaaaaaaaaaaaaaaaaggcagatatttgtaatcaaacagcagacagggggtttggtgccagccagcagcctggctgtgtggccttggccaagtccttcaccatcagttggcccatatgttccgtgggttcaggccagagggtctgaggtccaaggtaactgcataggtctcagtcgattctcaagtctccccccagccctggtcactctctgagtgcacgctctggggacctcccttctctccaagcctcacccatggcaacttcctttctctgcgtcacccaagcctctcaggaggggtcatgcttttccaaggagtggggcgaaaccggacatatgactatgcctcctctgaccagggccacagcgaaggtgggagtaggaggcctttacagttgaggggctcagttttttcatctgtaaaatagtgatgataataatcatagtgtttacctgatggagttgttaggacattgagttattaacatgcctggcacatagggagagctcaatgaatgtcagctgttgtgaagagtgcagaatgactccctgaagtggcttgcctacactcccctctcaatttttcctctgaagaaatgcttcttgctgggcgcaatggctcacgcctgtaatcccagcactttgggaggccaaggcgggtggatcacctgaggtcaggagttcgagactagcctggccaacatggcgaaaccccatctctactaaaagtacaaaaattagccgggcgtggtggcagacgcctgtaatcccagctactcaggaggctgaggcaggagaatcgcttgagcctgggaggaggaggttgcagtgagccaagatcacgccaattgcactccagtctgggcgacagagcaaaattctgtctcataaaaaaacaaaacaataaaaaaattagctggttgtggtggcacacacctgtaatcccagctacttgggaggctgaagcaggagagttgcttgaacccagcaagtggagatggcagtgagctgagatcgcgccactgcactccagcctaggtgacagaatgagactctgtctcaaaaaaaaaaaaaaaaacagaaaaaaacgaaaaacttgttaggctgcagaatagcagaattttcatgaagcaattcctgcactgcctcccacattctattagccacaaggaggaaaaaaaaaaaactatgtttggagggcaacgaagcgtgtaaaatgaaataataccatattccattgattctgacaccttttctttcatattttaacctctctgaaattgaggtgcatcctaggatcagtggaatatccatttgtagtcagtaactatttttcttaggggctcaaaacggcatatctcatattggatggcatcttagaagtgacaagctgtggtgtacaaaaagtgccaggctcagggcccgccacgtcacaggccctcaggttgtcctcatgaccttcagcatccccagcacattcgaggctggtcatggtggagtgatcagcttttctttctttttgtcattttctcactgacacctgctgacctgcatttggtccccggcttgacaggcacatggcaaatgcagtcagggaggcatatggggagggctcaggatgggaagagaaagactttttataatatattaagatattcaaagaggaggagccagagattctttttttaaaaaacaaacaaacaaacaaaaaaatccccgctggaagccagagttatatatatgccacacaggccaggaaacccagcaggcctcctggagctggcagcaaaccgaaacaggggtattgtgtccaggccactggctggctgagggacattgttagggccttgccctgtctgggaaaaggggggtggcggggcagggggagtgtgttcccatgactccctggggagtaacaacaattgggccagctgggaagccggggatgccaggggcccagtgggcaggaggtaggcccccgaggggccatggagggcactgcggaggctgaggaggtggggtgcgggggaaggaaggtcagggtctgtttcttagctgggaggcaaggcctaggaggggaaacatgggcgtccttcactacacccctccctcaccccctccaaagccctgggccactgtgtctctctcgaaagtgcaccccagatgtgcccactcttctctacctctgtcgtcacccaccctggtctccctgcaggaccaccacgtggcttcctcactgggatgtatgccaccggcctggctcctacactctgttctatacatgaactagaaggatcttcccccaacataacccacatcacgtcactctcgtctatacctgccacaggctgcccgccacacttagaaaaaaagccagaccccttgccctggcccatgaagcctgcctggtggatccagctggcctccggcttcatctccagtgagccccacccctgcactcagtcagccaggctggccccttcccagccttggaatgccttggcctgctccctcctcaaagcctgtgcacttgcagaactcttgattggaacgctcttcctccaggcttgcagagctccccccttggtattcagggctcagagcaaacatcacctcctcagagaggccttccccggaaaacagcctcccattctctcctcccaagccccctctatcacactgccctgtatgacttcatggcaccccccaccctccaaagttctggaatgtggtcatcattggtcagtcttccctccttaggctatgagccccacgtgggaactgctttcttttgtcactgaatcctggcctccaccaccacctggcactttctaagaactcagccaacattagctagtatttgtatgattcctgtgctcagggcttggtaaaccatgccagctgcggctgggcacggtggctcatgtctgtaatcccagcactttgggaggccaaggcgggtggatcacttgaggccggcagttcaagaccagtctggccgacatggtgaaaacccgtctgtactacaaatacaaaaattagctgggcgtggtggcacttgcctgtaatcccagctacacaggaggctgaggcaggaggatcacttgaatgcgggagacaaagtttgcactgagctgagatcacaccacagcactccagcctgggaaagagaatgagaccccttctcaaaaaaaaaaaaaaaaaaaaacaacccaaaaaaaggcacaatgcccgctgctatgtggtcaggtggggaaggctactcttttttttttttttgagacagagtttcactcttgttgcccaggctggagtgcagtggtgcgatctcagctcactgcaacctccgcctaccaggttcaaacattctcctgcctcagcctccctggtagctgcgattacaggcatgtgccaccacacccggctaattttgtatttttagtagagacggggtttctccatgttggtcaggctgatctcaaactcctgacctcaggtgatccgcctgcctcggcctcccaaagtgctgggattacaggcgtgagccaccgtgcctggccggggaaggctactcttgagcagggagtcagaatctgggacccatggaccccaagttccatgaacttagacagaaaaaaaattacatttttattttcactagactctaactgaaatggaacatttcgttccattttgaatgtaggcaacaaaccagacgactgttggcagcacgtgggactttgtccccaatagaaatcacagctgtttccatctcccctcccagtgctgtgggtaccctgggatatgctcatgcctatcctacctctgaaatcatggccattttgaacctgatgctagatctttttattttatttatttatttattttgagacgaagtctcgctcttgtccccaggctggggtgcaatttcgcgatcttgactcactgcaacctccacctcccagattcaagcaattatcctgcctcagcctcccgagtagctgagactacaggcatgtgccaccacgtccagctaatttttgtatttttagtagagatggggtttcaccatgttggccaatctggtctcgaactcctgacctcaggtgatctacctgcctcagcctcccaaagtgctgggattacaggcgtgagccactgtgcctggccagatgttgttatttaatgtgttaaagaaagaacatggccgggcacggtggctcatgcctgtaatcccagcactttgggaggctgaggcagcgaatcaagaggtcaagaaatcaagaccagcctggccaacatggtgaaaccccgtctctacttaaaatacaaaaattagctgggcgtggtggcacacgcctgtagtcccagctagttgggaggctgaggcaggagaatcgcttgaacctgggaggcgaaggttgcaatgagcctcaatcgcaccactgcactccagcctggcaacagagtaagactccatctcaaaaataaataaataaaaataaaaaggagtgtcctaaaggagctgatgtggtctggccctgatccttctcccagctgacatccagcccacaaggagaagctggagggagaggccagaagagcaatgagaatgaggtttctgtcgcagacactgggacccacacttgcattccgcctggcttctgtcttgtttattaaattatgacatctgcagcagctttgagcacagagtcccagcacagaaaacaggtcccctccgttcagaagccctttctcagaacaacactcagaagagagctcagctctccctctgtcttctttattttttaattaatttcatttttattttttatctaaaggattacatgatcatcatctccctctgtcttctatctgggcagcacgagagtgggtcccactctacagggcaccctctgctgaaaatcaaaacttgctcaccccaaatgcccttcaaggctgaactaagacaaactctccccctgtgaatctggaacgagacaagcggaggaaaaaaaatttatttttataaagatcctcaaatttgtcatagaaagcaacccatctgaagtcacaaattgtggtgacgtgggcttcgttttgagaggttgagtacagcatggtgttctggtttaggagagagccacgttcaaagtctgattcttatacaccccaaatgcactcatggagaggtaaaagtgaacaatgtggaaggaaacactgtcactagaatcccttctgcagcttcagtgtggaaggctgcagcggcgagcatcaaacaaggcagcttcttggcgtctgggcctgtgagtcaccgcgctcacatgggttcacttagcatctctaatttgggagcagagcagcagaagaggcccaaattaacttgagttttgtccttccccttttacttggagttctgtgggcctgaatgcttggtgtcatctactgtaaggctcaggacacctggggccatcgtcttcacactgatcacggcaaggatctgcccaagatatttgggagaggaagctgtcaggggcgtagggggaaaacaggctcaaagaaaggactcacttttatattggattattgatcaaagagatcgccgaacacacagaggacaaggaagaaatgccaaagagttgagatgacattgcaatgtaaaagtttcttttaagataaaaataggtggctgtgcatagaatattccaggaaggctgtatgagaaagtgctaacagtgggtgccccagcaaaggaagggcctagggatgcagcacaggtgtaggaaggaacctgacttttccctgttacacacttttttttttttttcagacaaagtctcgctctgtcacccaggctggagtgcaggggtgtggtctcggctcactgcaacctccacctcccaggttcaagcgatcctcccaactcagcctcccaagtagctgggattacaggcgcacaccaccatacctagctaatctttgtatttttagtagagacagggtttcaccatgttggccagctggtgttgacctcctgacctaaagtgatccgcctgcctcggcctcccaaagtgctgggattacaggtgagagccaccatgcccggcccttttctttgcagggggcggggaaagggtctcactctgtcacccagactggagtgcaatggcatgatcacagctcactgcagcctcaacctcccgggttcaggtgatcctcccacctcagcctccccatggtgtacatgccaccataccaggctaattgtaatttttatagagacagggtctccctcttgcccaggctggtcttgaactcctgggctccagcaatgagcctgcttcaggctcccaaagtgttaggattatagcgtgagccactatgctggctatcaactttttataactttgagttttgtactatgtgtagtattgatttaaaaatattttttctgctctcgctctcgctctcgctctccctctccctctctttccacggtctccctctgatgccgagcggaagctggactgtactgctgccatctaggctcactgcaacctccctgcctgattctcctgcctcagcctgccgagtgcctgcaattgcaggcgcgcgcagccacgcctgactggttttcgtatttttttggtggagacggggtttcactgtgttggccgggctggtttccatctcctaaccgcgagtgatccgccagcctcggcctccggaggtgccgggattgcagacggtgtctggttcactcagtgctcaatggtgcccaggctggagtgcagtggcgtgatctcggctcgctacaacctccacctcccagccgcctgccttggcctcccaaagtgccgagagtgcagcctctgcccggccgccaccccgtctgggaagtgaggagcgtctctgcctggccgcccatcgtctgggacgtgaggaggccctctgcctggctgcccagtctggaaagtgaggagcgtctctgcccggccgccatcccatctaggaagtgaggagcgcctcttcccggccgccatcccatctaggaagtgaggagtggctctgcccggccgcccattatctgagatgtgcagagcgcctctgccccgccgccccgccccgtctgggatgtgaggagcgcctctgcccggccacaaccccgtctgggaggtgaggagcgtctctgcccagccgccccgtctgagaagtgaggagaccctctgcctggcaaccgccccgtctgagaagtgaggagcccctccgcccggcagccaccccatctgggaagtgaggagcgtctctgcccggcagccaccccgtccgggagggaggtgggggtcagcccccgccaggccagccgccccgtctgggagggaggtgggggggggtcagccccccgcccggccagcctccctgtccgggagggaggtggggggtgtcagccccccgcccggccagccgccccgtccgggagggagttgggggggtcagccccccgcccggccggccgccccgtccgggagggaggtgggggggtcagccccccgcccggccagctgcctcgtccgggaggtgaggggcgcctctgcccggccgcccctactgggaaatgaggagcccctctgcccggccagccgccccatccgggagggaggtgggggggtcagccccccgcccggccagccgccccgtccaggagggaggtggggggtcagccccccgcctggccagccgcctcgtccgggaggtgaggggcgcctctgcccggccgcccctactgggaaatgaggagcccctctgcccggccagccgccccatccgggagggaggtgggggggtcagccccccgcccggccagccgccccgtccaggagggaggtggggggtcagccccccgcctggccagccgcctcgtccgggaggtgaggggcgcctctgcccggccgcccctactgggaaatgaggagcccctctgcccggccagccgccccatccgggagggaggtgggggggtcagccccccgcccggccagccgccccgtccgggagggaggtgggggtcagccccccgcccggccagtcgcctcgtccgggaggtgaggggcgcctctgcctggccacccctactgggaagtgaggagcccctctgcccggccaccaccccgtctgggaggtgtacccaacagctcattgagaacgggccatgatgacaatggcggttttgtggaatagaaaggggggaaaggtggggaaaagattgagaaatcggatggttgccgtgtctgtgcagaaagaagtagacatgggagacttttcattttgttatgtactaagaaaaattcttctgccttgggatcctgttgatctgtgaccttacccccaaccctgtgctctctgaaacaggtgctgtgtccactcaggattaaatgggtcggtgcaagatgtgctttgttaaacagatgcttgaaggcagcatgctcgttaagagtcatcaccactccctaatctcaagtacccagggacacaaacactgcggaaggccgcagggtcctctgcctaggaaaaccagagacctttgttcacttgtttatctgctgaccttccctccactattgtcctatgaccctgctaaatccccctctgcgagaaacacccaagaatgatcaataaaaaaaaaaaaaagaatttaaaaaaaaatatattttttcctctccctctccctctccccacggtctccctctccctctccccacagtctccctctccctctctttccacggtcttcctctgatgccgagccaaggctggactgtgctgccgccgtctcggctcactgcggccttcctgcctggttctcctgcctcagcctgccgagtgcctgcgattgcgggccgcaccgccacccctgactggttttcgtatttttttggtggagacgggttttcgctgtgttggccgggctggtctccagctcctgaccgcaagtgatccgccagcctcggcctcccgaggtgccgggattgcagacggagtgctcagtgctcagtggtgcccaggctggagtgcagtggcgtgatctcggctcgctacagcctccacctcccagccgcctgccttggcctcccaaagtgccgagattgcagcctctgcctggccgccaccccgtctgggaggtggggagcgtctctgcctggccacccatcgtctgggatgtgaggagcccctctgcctggctgcccagtctcgaaagtggggagcgtctctgcccggccgccatcccatctaggaagtgaggagcggctctgccctcccgcccatcgtctgagctgtggggagcgcctctgccctgctgccccgtctgggatgtgaggagcgcctctgcccggccgcgaccccgtctgggaggtgaggagtgtctctgcccagccgccccgtctgggaagtgaggagcccctccgcccggcagccgccccgtctgagaagtgaggagcccctccgccgggcagccaccccatctgggaagtgaggagcgtctccgcccggcagccaccccgtccgggagggtggtgggggtcagcccccgcccggctggccgccccgtccgggagggaggtgggggggtcagccccccgacccggccggccgccccgtctgggagggaggtgggggggtcagccccccgcccggccggccaccccatccgggaggtgaggggcgcctctgcccggccgcccctactgggaagtgaggagcccctctgcccggccgccaccccgtctgggaggtgtgcccagcggctcattgggaacgggccatgatgacaatggtggttttgtggagtagaggagggggaagggtggggagaagattgagaagtcggatggttgctgtgtctgtgtggaggggggtggacatgggagacttttcactttgttctgtggtaggaaaggttcttctgccttgggatcctgttgatctatgaccttgcccccagccctgtgctctctggaacatgtgctgtgtccactcagggttgggtggattgagggcggtgcaggatgtgctttgttgggcagatgcttgagggcagcatgctcgttgacagtcatcaccactccctagtctcgggtgcccagggacacagacactgcggagagccgcagggtcctctgcctgggaagaccagagacctttgttcacttgtttgtctgctgaccttcccttcactgttgtcctatgaccctgcggaatccccctttgcgagaaacacccaagagtgatcaatggaaaaaaaaaaaaaaacaaagaaaaaaggaacagaagcaaatgtggcaacatcttgataactgttggaactggacgttgggtacatggggttcattaaactcttttctctaaaaaaaaaaaaaaaaaatatttttttaggctgggcgtggtggctcatgcctataatctcagcactttgggaggctgaggtgggcggatcatgaggtcaggagatcgagaccatcctggctaccatgatgaaaccccatcgctactaaaaaaaaatgaaaaaattagccgggcatggtggcaggcgcctgtagtcccagctactcgggaggctgaggcaggagaatggcatgaacctgggaggaggagcttgccatgagccgagatcgcgccactgcactccagcctgggcgacagtgcgagactccatctcaaaatatatacacatatatatttatttatttatttatttattttagtcttacatgtcaaaagaattaacaggattgtagcaggtgtttagtaagtagaggttaaaccattctatttcaggaactagcatttaggaagcatagcacttactgtgcaacaagagccctctggccatccctgttttacaggtcttagagaatggagggcagctaggaaggagccaaatgggactcctctcagatctgctggaaggcagagccctgctccccggcacagaccacactgccttcctccctggagtgtgcagttggaagcaccagatgctctagcagcatccagagagatgccatctgtgagggaaacctattcttagagagcagagacagtcggtagcggagttggccaacccccagcagcagtggcgggacttcaggagggcaggcggccaaggtttcaccttcagctgggggcaggacaggctaaaagcagggtgtgctcagtcctcaggggcacacttcctctacatttggatgctcttagaaataacagcatttattggggactcactttaactgtgtcatattctttaaccctccacaccactcgatgaggtgtgtgctacgacaacgcctactttatcaatgaggaaatagaggcacagaatggctcagtcacttgcccaaggaaactgtggggccagggcttgagcccaggcactctggctccaaagcctatgtccctgaccaccatgctatattgcctctcaacctgctgtacagaggccagttttagtttgggttcccccaatagcagactctaagacaagggtttgagtgcaagtggttcatatgggaagtggtcccaggaagcactggtaggggcatgaggaagggagatggggagggtgtttgaggctcagccctgctgggcggccctgggagtcagtgtggagcacgcacctctgagttatcccacccgaggggtgagggatgcgggctgtgggagtgggggtatttatcagtcattggttgaaggttgctccaaggatgtgttcattctccagcccttcaggcctgccagaggctggcaaaggaggcaccagtgacaagctagagtcctcaggcagaaagacagaggggcggccactggcaaagctggctagtgtgcaccagagtcgttatttagaggagctataggcagggcacccccaccatctgctataaaacctgcctggtgatggcccaagccctctgccctccccaacccctagagcagcagtccccaacctttttggcaccagggaccagttttggggaagataatttttccacggaccactggggaggggacgtggtttcaggatgattcaagcacattgcatttactgtggattttatttctattattattaccttgtaatatataatgaaataattgtacaacacaccataatgtagaatcagtgggagccctgagtttgttttccagcaactagacagtcccatcaaggcgtgacgggagacagtgacagatcatcaggcattagattctcataaggagcatgcaacctagatcccttgcatgcgcagttcacaatagggtttgcattcctacgagcatctaatgccaccactgatctgacagaaggcagagctcaggtggtaatgtgagcagtggggagtggctgtacatacagatgaagcttcgctagctcacccacctttcaactcctgctgcgtggcctggttccgaacaggccatggaccggtaccggggttgcggaccccttactctagagctcattcaacctccacagcaagttaaaggaacttcataattacctactccaagtttgcagtaaatgttgtggctgaaaacacagcttacagaatcagactgatcccacctcaattacctaagggctctgtgactcatttgtcagatgggataataatggacggctccatatcattccccacccccttgttactcagagcagcaccactggcagcaccagggagcctgggagaaatgcagactctcaggccccaccccagctcactgaatcagaagctgcattttaataaggtctccagtgactcctgcatacatttctactagtaacttctaaaatatagaaagagtgatggagtaagtatattaatgaaagtgtatctaccagaccaatggtctcaaattggtagcccatggaccagattttcctggagacttgtttgatttgtccaggattgtgtttttttttttttttttttttttgagacagagtcttactctgtcacccaggctgaagtgtaatggaactatctcggctcacagcagccccccaggttcaagagattctcccacctcagcctcccaagtagctggaattacaggtgcctgccaccatgtccagctaatttttgtatttttagtagagacaggatttcgccatgttggccaggctggtctcgaactcctgacctcaggtgatccacccgcctcggcctcccaaagtgctgggattacaggtgcaagccaccgtgcctggtctaggatcgtggtttcgaaaaaagcagacttggccaggcatggtggctcacacctgtaatcccagcattttgggaggccaaggtgggtggatcatgaggtcaggagattgagaccatcctggctaacacggtgaaaccccatctctactaaaaatacaaaaaattagccgggtgtggtggcgggcacct

SEQ ID NO: 59117 - DNA, 2274 bp, Homo Sapiens
gaatacttagctttatgtaacagatgcatattcactgaatttttctaaactgaatcatattttaacctcatagaaggatcttaacttacttatgaaaggaacctgatgaagaatcagcttataaaccttcaacttaactttttaaaaatgtgactttccctatgacaaaccaacagtttatcatagttttaaagagtagctattattcacctgactctgaggtagatgctggggttattaaccaaaggaagacagttctcacgtggaaggattcactgataatagattgggaggttattctaaattccacaagctaagagggagtagcaaacagcattgaatagttatgttctagatgggagtattcaaaccaagaagactcaggggagggggtcttccctacgatctagtggaagaagtgcgatcaagccaggctttgaaaggtagagaggatttggacaggatttgggaatagcagctgggtttggtagccacagaattcagtcttgattgagtttcacttttcctgaaaacaaaggacagttcctctgagccaccttaaacctggtttccactaagactctgatacaacattcaggaacacaaagacccgattgcaatcctattaagatttctttcatgcttgtttaattatgacatacagaacagcaataatattaagtcgagtttaattatttttaggtgagcctttatttttcaatatatcttttcctctttaaaaatttcatctctacacaattctacccatcccccaccctttggcatttcctgccaggcctgggaagccaaattctggagggctttgctgcaaaggaaacaaagggtgaactagagaatctcccttagccaatctcccttgctgccctagggaaaacgcagcatggaaacatccttacaaagcaacgggagacgtttttcaaatgcgtttgaatcatctgtgtgagcacggggagaagtgagaaaaggagtgttaacaacgtaggagcaaaagtgtcatttcaaggaactcaactctgaagaacagaaacactaaaccaaaaaaaaaaaaaaaaaaaaacgaagtaaaaattaggccattggtagattttgttctaaagagacagctatgtcagattaaatctaaacgagctgacagagccgttgaggatgggtctctttcctgctagaccatactgtctacctgaggcaccactactactccgaaggagttggagagtgtgtgagcaggtttggtgagtgcttttcgagaagagattgagatgctcaacacaatgagttggtttgtgggtcaggcagccacctgggaatcaatatgctcgccagtaacagattacaagcagagatagcctcagtaatttgcaatggattttagagaaatgagatccgtggtagaggttacaggcttagtgttggcagaatcagttattaatagaatcagactccagggaagtccatctctttacttctgaagaccatctttgcttgatagtgggctggacagcaatgccatttattctaatcagccaattaacacatctttagtgagcacctatggtgtgcaaatcactgcaagatgtgacaagacttttatggcaggacctttggtcaaactagttgaggggtaagctctactctcttgtgaaggaatgcacgggtgtatgtgtgtggtggcgtgtgtctgtgtagatgagctggcggttctctggccggtcagagaaagatcgtcactggtttccacgatcaagcaaggcttcatggagcaagacaacttcacccaggtcttgaagcataacaggattcattctgtgtgataaaggaaaagttgtggagtttgttaatgctcatgtgtcccaggggcagagaaggatgtgttggctcttaatctaactgctgcagcttcgtgtaacctctttgcatataaggaaaccttacatttgaataggacctttgcttttaaaagtgccctgactggctaggtgcagtggctcatgcctgtaaccccagcactttgggaggccgaggcaggtggatcacctgaggtcaggaattcgagaccagcctgaccaatttgatgataccccatctttactaaaaatacaaaaattatccggacacggtggcgggcacctgtaatcccagctactcaggaggctaaggcaggagaatcgcttgaacccaggaggcagaggttgcagtgagccgagatcgtcccactgcactccagcctggggcaatagagctagactctgtctc

SEQ ID NO: 59118 - DNA, 1813 bp, Homo Sapiens
aggaatagtcttccactaattcgctaggagtttgctctccccactcctatgggcttgtgagaggcatgcacagagtcctataatgcccactatgcatgcctgtagcaactttgaattctgttacatcatctggcacaatggccaagcaacttgggccagactctatatctgctatagagcccgtttttgtttcgggtttgacttgagacaagcagcccttgcaaactcctttagtgagtcagagaaatatccttaaatgtggtatatgttgaattcaaaaccccaataagcccccataaaactgtatttcccttttagtgataggaagtatatatatatagggcaacatgccatttactgtaaaaaggatgttttgacaaaaggaccagaagcattggacccctataaacttcatctatgttataggtctttgaatctgctgaagtttatgtctcttcttccagtattttacttctgttcaatgttataatattttactatacttaaggaacttgccacttcctgcttatgggtaccactttatgtaatattattaatatattgaattaacatgatgttttgcaaaatgtcaattaaactgaaagcagaagtgacagccctgacagaaaacagtgaagcagtgttcttgtttttaccacaccaaagcaaattgttttgattttcctccacaatgtgtgtagattaaaaagcattagctaaatcaaaagccgcatacaaagtgctggaaaccacattctgctcagtgaagataccacatcctagagcgaatgtgcaagtgtgacttaagtttatgctaatgtgcattcatcctataatccatctggttttgacagaggccagttaggttaactgaataaagatataaaatggacgaccgccccctggaacttttgagttttttgttgtggcagcgaccaattctgtttcctggagaatgcagttattatgttttattcattttattgccaggaaagtagaatttcagaagcctccccttggtcctgcttacaataatgtcccttggtatacaggtcaggaagaaatgtaagagtcctgacagctgttgaacctgtcaacttcaattacactttcaggaaggggtaactacgatgaactcattagaacccctttgggttggacatgggccaaagctctatgtaccatctgatcttcaaaaactcatactccagtcctattgaggcagctcatacctgtaatcctaataatttaggaggccgaagtgggaggatcactttaggctgagagtttcagatcagccttggcaacatagtaagaatctgtaaaaaaaaaaaaaaaaattagttgtttgtggtagtgtgtgcctgtagttacagctacccagaagactcaggcaggaggattgctttagcccaggaattcgagtttgcagtgagctatgatggtgtcattgcactccagcctgggcaatcaagcaagatcttgtctctaaaaagaaacaaacaaaaacaacaaacaaaagcccaaaaagggcctggtgcggtggctcatgcctgtaatcccagcactttgggtggctgagtggttggatcacttgaggtcaggagttcgagatcagcctggccaacatggtgaaaccccacctctactaaaaatacaaaaattagccaggtgtggtggtgttgcacctgtaatccaagccacttgggaggctgaggcatgagaatcacttgaacccgggaggcagaggttgcagtgagctgagatcatgccactgaactccagcctgggcgacagagcgagtctccacctc

SEQ ID NO: 59119 - DNA, 531 bp, Homo Sapiens
gcacgaggtaaatcaggaaaaatattttttgtcattattacattaagaaaatttattatccaggtgacagtacatactggagtttttggaagaagtgaggagccatgacctaaaaaagcttgtgtttcctgccagcagcacatcttaaccaaagatgttccagctaagttaacccagaatattagacaggaaagaaatctgaaaacagatgatgcacttgcaaattgtgcaaggcttgttctgtaatgcaaataggatgtcttctttgaaatgtaaaggcactgagcctaagcatgaggaattttaatgtctaatgatgaagctatagagagaaatttcagttaatgaccaggtaggtataagatggtgtccttagataattctgatatcagaactgatgttaattgtagtttaagacaactctcctgagacaggagaaccgcttgaacccgggaggcagaggttggggtgagccgagatcgcgccattgcactccagcctggacaacgaaagcgaaactctgtcccagga

SEQ ID NO: 59120 - DNA, 478 bp, Homo Sapiens
tttttttaaggcgggatctcactttgtgcttagggtggtattgaacttctgggctaaagagatactcctgacttagcctcccaaagtgctaggattatagcagggagctactgctctgggtcagcttttctgctaaaatgctttgctgaggtggaaatgaggagggtgaagcagtgggcgggcatttgttttacaaaggctctacctagactgtaccatctggtgaagtgcttgtaacttttaaggtggaaacgatgccatttttcctttattctcccgtctgtaagaccagaaggcaattggaggatcctcaaataccagggagaaaccaggtagcagaagaagtagtatggtgggaggggaagatcaaagcaaacgcctggggagtgagtgacaattgcgaccccaaattgggtctcctgacttgtcaaggcccttctctgggctcctctgcacctgtcctgtgcccaggttgatc

SEQ ID NO: 59121 - DNA, 590 bp, Homo Sapiens
  misc_feature (455)..(455): n is a, c, g, or t
  misc_feature (475)..(475): n is a, c, g, or t
  misc_feature (494)..(494): n is a, c, g, or t
  misc_feature (500)..(500): n is a, c, g, or t
  misc_feature (510)..(510): n is a, c, g, or t
  misc_feature (514)..(514): n is a, c, g, or t
  misc_feature (536)..(536): n is a, c, g, or t
  misc_feature (580)..(580): n is a, c, g, or t
  misc_feature (587)..(587): n is a, c, g, or t
gtggaaaaagtagaagtcagacaaggaccaggaactggccaatgtacatgaataaatggaaatttgcttctatctctgtgcttggaagcaagctcaagccaagaggataagcaaaacaagtctaagaggtcaccaggcccctgatgacaagctaaattcagattgacttctatgtgtcagcccacttaggccagtgcatttgctgtatgttgggtggctctgaacacagcagaaaggggactaaatgcagtactgtcttacagtgatctggaaggccttccccacgttccaacctgctgaagctgggaaggcagcagggatagttcataggcttgctggggcacaagcccagtcagaaggtctcctgccccattctctccttggaatatgtcctcactggctgagcatgaaggaagctggttcaaagggcagaataaaccatggggaatgggaanggccaaagggccaaaagttnccaccttttgagtccactnaccttnatctgggggnggcncatatgccaaaacctggcggangccagccaatggcctttttttccttgggcctttaacccttcaanaaaaggnttg

SEQ ID NO: 59122 - DNA, 519 bp, Homo Sapiens
gcgtcgacttttttttttttttttttttttttctgaaaaaaatcatgagtgagttaaatttaaatatttcaaacatgcaaactctcaagagggtaccatgattacagggattaaataacataaaggtttcctacaaactctacacctgcttttgccccttaaatatcaaatgtagttacattctggtgcaaacttaaaagtaattttcaaattctgtctgaacatggtgtcttagtctgcttgggctgccagaacaaaataccatagactgggtggcttaaacaacagaaataaattttctcacagttctgaaggctgggagtccaggattaaggttttgcagggtttggtttctagtgagggctttcttcctggcttgcagatggccatcttctctccataggctaacatggcctctactttgtgtgtgggagagtcagagatagagcaagccctcttgtgtctcttcatataagcctactaatccccatcagaccaggtcccttatgatcttaaacc

SEQ ID NO: 59123 - DNA, 184 bp, Homo Sapiens
agttactcaggctagaaacttcatcagccatgaaacaggttcaagacagagagtactacaattagacttatgctttagaaaagtcagtcttttacctgagcagtattatcatagtacaatgcttgttatgaaaaaaaaaaaagggcccattgaattaaattagtttggccaggcaaaaccaaac

SEQ ID NO: 59124 - DNA, 1286 bp, Homo Sapiens
atgggaggctgtgcaggctcgcggcggcgcttttcggattccgagggctgctgggcctttgcaacaacttctcttatgtggtgatgctgagtgccgcccacgacatccttagccacaagaggacatcgggaaaccagagccatgtggacccaggcccaacgccgatcccccacaacagctcatcacgatttgactgcaactctgtctctacggctcccccgggttctcgtcagtgggatttgtgctgctggaagcttcgtcctggttgccttttctcattctgtggggaccagcctgtgtggtgtggtcttcgctagcatctcatcaggccttggggaggtcaccttcctctccctcactgccttctaccccagggccgtgatctcctggtggtcctcagggactgggggagctgggctgctgggggccctgtcctacctgggcctcacccaggccggcctctcccctcagcagaccctgctgtccatgctgggtatccctgccctgctgctggccagctatttcttgttgctcacatctcctgaggcccaggaccctggaggggaagaagaagcagagagcgcagcccggcagcccctcataagaaccgaggccccggagtcgaagccaggctccagctccagcctctcccttcgggaaaggtggacagtattcaagggtctgctgtggtacattgttcccttggtcgtagtttactttgccgagtatttcattaaccagggactttttgaactcctctttttctggaacacttccctgagtcacgctcagcaataccgctggtaagaggagcgagggcagtgggctgggagggcgccgtggtgatgcagctgccctgcccagtaggcaccggggggagcgggatggtccctggaggagcctcctctcctccccccaaccctaacctcaggtaccagatgctgtaccaggctggcgtctttgcctcccgctcttctctccgctgctgtcgcatccgtttcacctgggccctggccctgctgcagtgcctcaacctggtgttcctgctggcagacgtgtggttcggctttctgccaagcatctacctcgtcttcctgatcattctgtatgaggggctcctgggaggcgcagcctacgtgaacaccttccacaacatcgccctggagaccagtgatgagcaccgggagtttgcaatggcggccacctgcatctctgacacactggggatctccctgtcggggctcctggctttgcctctgcatgacttcctctgccagctctcctga

SEQ ID NO: 59125 - DNA, 1789 bp, Homo Sapiens
aaatggcagtgtctttatttgtacattggggatgttaatactatctttgtaggtaggtttaatatatggattaaatggaatactatatagaaaatgcctatcaaaattctcaaataggtgccaataaatattaatatctataaatgcaatcattattattattattgtgaataaaaataccattgcttgattttatcagtccttagcaaaacttcatacttgtaagcctgttttatctctgtggatgggcttctgaattcccttccttgagaagtattttaaagcaaggcaaacagtcagctgaagtaaggaatagatgatgaatgaggttaaaaaaaaatcacttattttaaaattaaataaatgtttgtggagtacccgttgtattcaaagccctgtgttaagtgctaggaatactattttaagccagtcagactagatttctgactttatggaatttatatcctcgtgaaagagatggaaaataagctagtaaagaaacaaaaagaaagaaatgtcagggactgtgaagagaacagataatgtgatagggaacctggaggggtctatgtgtgtgggttaccctttggatggggtgattagagatgcttctctgagaaactgacctttgagctgagacctgaaatgtgaggagccagttgcttgaagagctgggaggggagcgttctaggccagtgccaaggcctaaggtgagggagaactggtgtgtttggggaactaaaaagaggccggtatagtttatttccttcattattttgtcttacatttcctggtctttgggaatataaaaaaaggggaactgtgtaaactgagaaaaggtgcagtaaacaccctgcaaataattctgcattcagcatatatattcttaacagagttgatagctataatgaattataaattttgagaattatagtagaggtatatactgacctagaaatgcctctgttcagggtgataaatatcttaaacatgagagatttgctggtcctcaggaagtaaatgttctctgtagcataggactctagttaagatgagtaaaaaagctgattgtagagctgtgatttcatttaggaaccccttttcttttttatttttttgagtaggttaattgcagcagtttcctcattttatttcttggtactttatcacccatcaaaattttaaaaaacttttccctaattggccaatgttcttatttttttctttcttttttcttaaccttgaaagcatcttgttttttttctgaccgaaaggtatctgccgctgattatttcagtcgctccaatcgtaggggaagtgttgtctctgaggtggatgatatcagtatcccagatttgtccagcgtgagtgtattgcatggggtggttggttatgttgtcccaggcttgtgactaacagctaatatgttagctattttataataaaagtgggaacttgatttattgtcttaagaaatatttgtttgggccgggcatggtggctcacacttgtaatcccagcactttgagagaccagaacaggcagatcacctgaggtcaggagttcgagaccagcctggccaacgtggtgaaactctgtctctattaaaaatacaaaaaaaattagctgggtgtgggggcgcacacctgtaatcccagctactctggaggctgaggcaggaatatcgcttgaacctaggaggtggaggttgcagtgagccgagaccacaccactgcactgtatcctgggcaacagagtgagactccatctcaaaaaaaaaaaaaaaaaa

SEQ ID NO: 59126 - DNA, 468 bp, Homo Sapiens
  misc_feature (309)..(309): n is a, c, g, or t
  misc_feature (323)..(323): n is a, c, g, or t
gcggccgccctggtacaatgaacacggcacgcaatccaaagaggccttcgccatcggcttgggaggcggcagtgcctctgggaagaccactgtggccagaatgatcatcgaggccctggatgtgccctgggtggtcttgctgtccatggactccttctacaagatgcctttgacttcgacctcatcatttccaccctcaagaagctgaagcaggggaagagtgtcaaggtgcccatttatgacttcaccacgcacagccggaagaaggactggaaaacactgtatggtgcaaacgtcatcatctctganggcatcatggcctntgctgacaagacactgttggagctcctggacatgaagatctttgtggacacagactccgacatccgcctggtacggcggctgcgccgggacatcagtgagcgcggccgggacatcgagggtgtcatcaagcagtacaacaagttt

SEQ ID NO: 59127 - DNA, 204 bp, Homo Sapiens
gagaagacgacagaagggccccattctcagggatataactgctattccagtttaataactagcttcaaaacaaaatgaatttttatattttctagatgaataatgtacaaccaccatcttcgtctgagcttgttattactttcaaacacaaagcttcattttaagcttggttaaaaaaaaaaaaaaaaaaaaaagtcgtatcga

SEQ ID NO: 59128 - DNA, 1709 bp, Homo Sapiens
cttctacaaggaaacaaaaggaaaccgaattcactgctcaataaatgtgggaattcctggagttatctacattggcagctgtcatgagtggttactaggaatctagctaaatccctaagtaactgggcgatggatttgggtgggggaattgtcacacctctgcttataagagaggatggagtcgtgtagttgggcttcccacgtgacgtctaggtcctagaattgtgttctgtggacagacagtccagcacgcatgttttgaatacttcctacgggccaagaattggactaagtaagactttcaggttgaagaaggcttagtccctgcccttgtggagggcatggttcagattgagagagaaatgaatatgtaactatggttaattataataaccagtcaaagtactaattactagaggcatgagaaggtgttgtaggtaccagaggggccaacctattttgcccttgtggatgagaaacttatcacagagggtgacatttaggatggtcttcgctgcatgtagtaggtactcaaggaacatgcagcttgctgtgtgctgatatttcttaaaattcttttgtgcctattttatcagtctgtgggccaatttgcaaattagttattaaaaggtattgctttcagtgagaaagctttatgaaatgggccagccctcctccttgttagaatgagtggccgcttagcgatttcatgtttggcccacttggagctgtggctgacctatggggcccagacatgtagctggtgttttcacaaatagccctgaacctggatacccatgagcacactactactctcaagcagttgctggaagatcccatatcttatcccagccatgccccctagacgcagaaggcttggggcctcttttggcacgtgccatggcatgttcttggtaggtgatccagttgagaagttaaatcttctgcggtggttaagtcatgaggctagcacgtagaccagcgctgagggaagggttccaggatgagattggagcctcgcaataaggagactactgcaaggcattggatgatactccagtgttgtcctcgagaaagccgagtgtgtcccagctctttctggtcattgcacttacgcagagatgcaccttctgctgctgtcatgaggctgtggggattgtgggcagactctgaacacttcctgagctagaatccgggctgcaccctcgtcttccgcaggctctgccatccttccagatcccagtctcaccacacatctacaccagtgtcagctgggctgctgccccctccgccgcctgctctctctctccggtccggagccggtcgctaagcttcagcgagccccagcagccagcacctgcgatgaaatctcatctgatcgtcacttctccaccccgggcccagagtggtgccaggaaagcccgaggggaggctaagaagtgccgcaaggtgtatggcatcgagcaccgggaccagtggtgcacggcctgccggtggaagaaggcctgccagcgctttctggactgagctgtgctgcaggttctactctgttcctggccctgccggcagccactgacaagaggccagtgtgtcaccagccctcagcagaaaccgaaagagaaagaacggaaacacggagtttgggctctgttggctaaggtgtaacacttaaagcaattttctcccattgtgcgaacattttatttttt

SEQ ID NO: 59129 - DNA, 510 bp, Homo Sapiens
ctccagtgggcgtcttgggccccggctctattctgggctgcgggcctgggaagggctcgccgggtgccaaatgagctgtcctaactctgcggggctgcagcttcctgcatgatgctggggagcttggcgcctgacccaggatctagaaggcactctgggcaggccgcgctccgcccacgaaggtacccaaccctctgggatagatgcaggaagcgatggttaagacccattttcacccaacttctcgccgcaggtttaaccaccaaggactctgagagctggcaggtctgagtaaccctggtaacaattctcttcaccttatcaaaacctgagctaaaaccaatgcatcagctgatgatgacagcagagagtggcagggctgaggacccaaagtcatttcccaggctggcggagaataaactgccagggagaagaatgagaagacaggagacaaactgtttggaaagctaaatcttccctcttaatgaataaaggtttttgccttgtctt

SEQ ID NO: 59130 - DNA, 578 bp, Homo Sapiens
  misc_feature (510)..(510): n is a, c, g, or t
  misc_feature (515)..(515): n is a, c, g, or t
  misc_feature (517)..(517): n is a, c, g, or t
  misc_feature (541)..(541): n is a, c, g, or t
  misc_feature (543)..(543): n is a, c, g, or t
  misc_feature (571)..(571): n is a, c, g, or t
ctggaattatttatccaggcagaagtataagaatggaattaaattatcttttgagtttctcttaatccaaaggcttaaatcccttgccagtaaaaaggacaaaacaaaaagaatataaatttttttctataggactcatgactccaggaaaatacacaaatccctttttagaaaaatctgatgttttcacttggtatatttccatctcttctttatcccctccacacctggagctcccactgaatttcttaagacagactctcagccggtgtaattagatgggagaattacatggagttacatggggtgagatgctggccctctgggatctctgggttcggagaaggtgccagggtggagaggcagaacaagtgggattgtgcatgataacatctcaagtgattttctcagtcagaagataaagcatattggtaagaagggcatctacagcgaagcttgcattgagacagttacaattgcacactcattttaaaaacaaactggccaagnaattncngctggcgtttaaccctgggaagangngaacagctgggagtggtttccccccaanccatggg

SEQ ID NO: 59131 - DNA, 2280 bp, Homo Sapiens
cggcctgccagcagtacttttgagttttttttttgttttgttttactttagcatttattattcatggattgaagaaatcaaaatggctgaagataaagagacaaagcatggaggacacaagaatgggaggaaaggcggactctcaggaacttcattcttcacgtggtttatggtgattgcattgctgggcgtctggacatctgtagctgtcgtttggtttgatcttgttgactatgaggaagttctagccaaagcaaaggacttccgttataacttatcagaggtgcttcaaggaaaactaggaatctatgatgctgatggtgatggagattttgatgtggatgatgccaaagttttattaggacttaaagagagatctacttcagagccagcagtcccgccagaagaggctgagccacacactgagcccgaggagcaggttcctgtggaggcagaaccccagaatatcgaagatgaagcaaaagaacaaattcagtcccttctccatgaaatggtacacgcagaacatgttgagggagaagacttgcaacaagaagatggacccacaggagaaccacaacaagaggatgatgagtttcttatggcgactgatgtagatgatagatttgagaccctggaacctgaagtatctcatgaagaaaccgagcatagttaccacgtggaagagacagtttcacaagactgtaatcaggatatggaagagatgatgtctgagcaggaaaatccagattccagtgaaccagtagtagaagatgaaagattgcaccatgatacagatgatgtaacataccaagtctatgaggaacaagcagtatatgaacctctagaaaatgaagggatagaaatcacagaagtaactgctccccctgaggataatcctgtagaagattcacaggtaattgtagaagaagtaagcatttttcctgtggaagaacagcaggaagtaccaccagatacttaaaagcttcaaaaagactgcccctaccaccacaggaggaccagcctaaccatacgctccaaaagatggctgtgatagatcttgtgaagcaattactgagcagatcaagatctttgggaaggaacactaaagatgttttgaatgaattatagtccactggcattttagtgtatttttttttctttttagaaacacacatttctaaaaatgtcatgttacattcctgcatgtcccttttgatagcattagtggatccattggatttcttttttctttttgtgagacagcttttagtcttacctgaatttatgtgtgtttttccgacagtggttaataattatattggtgatgtagcagcaattgtgttggcagggttttcatatattattagtaattaacactaactgttggactgacttgtgtacactgtgttaaacatgatttaaaagctattaagagtacttagcactcttaaaaacgctaacagagatcatcattagctgtgaagatttgagttgtatatacctgcactgatattcttatcaaaaatttctacattagctttaagtgttcagattaacacttttgaaatttttgtagcttttagctgattaattagaaaaattaatatttcagtgaaagttttaaattatcatttatttatttttttaaatgagaggggaaagctgaaattccttgttaagacacaaggaaaaagaatggccctactattatcatgcaaaaatgcctttgttggcacctcagattaatcatataatagctatagtctcttcagcattttgtttaaattttagaaaacctgtataaattactggtgcataacttaaagattattctgcctttggctaattgagtaattcccctccagcactagagaccgctcagtgctcttactagatgaactcagtaacgccttgagctgggttgattgaggatgtgtgaaaaatggtggtttattttgggctcagaaataattgctctgttgaaaataatcctttgtcagaaaagaaggtagctaccacatcattttgaaaggaccatgagcaactataagcaaagccataagaagtggtttgatcgatatattaggggtagctcttgattttgttaacattaagataaggtgactttttccccctgcttttaggattaaaatcaaagatacttctatatttttatcactatagatcatagttattatacaatggtagtgagtcctgcatggggtactcgatgtgtaatgaaaacctggaaataataagataataagaaaagcccgg

SEQ ID NO: 59132 - DNA, 446 bp, Homo Sapiens
  misc_feature (110)..(110): n is a, c, g, or t
  misc_feature (233)..(233): n is a, c, g, or t
  misc_feature (245)..(245): n is a, c, g, or t
  misc_feature (250)..(250): n is a, c, g, or t
  misc_feature (397)..(398): n is a, c, g, or t
  misc_feature (422)..(422): n is a, c, g, or t
  misc_feature (429)..(429): n is a, c, g, or t
  misc_feature (437)..(437): n is a, c, g, or t
caaagagacaataatttatttttaaaaaccattaaagacttgaattaatggagagatacagaattatcatggatagaaagataacattctttccccaaattaatctatanattcaatgtaattctaataaaaaaccttaacccgattgtttaattctacataatcatttaatcctaaagttcacagaaagagcaaggggtcaagaacagtcaaaaccattttgaaatacaganaagggtgggcanagganacttccttaccggatgtcaagaatttaggataaataacagagagggcattataatcagcagggaaacgttggaccattccataaactgctaagacaactgattatccatatgggaaaataatggactttatgccataaacaaaattnntttcaaagtgaattaacaaaatanaaaggcnaaatcctnaaattttta

SEQ ID NO: 59133 - DNA, 2339 bp, Homo Sapiens
gaaaaatcacaaagaattgcatggcagagtgcctgtctttcacagcttgaactgttgcaggaactttcttttttttttttcttttgtgatgcactccagcctgggagacagagcgagactgtctccaaaacaaacaaacaaacaaacaaacaaaaaaaccctgtagcttgggatcagccttctcttctgttgtttttctttaaaaaataaaaattaaaaataggcttcaagtgatcctcccgccatgacctccaaaactgctgggattgtaggtgtgagcactgcacccagccgtatgtttttttctacataaaaaacagcacaggattatcttccaaagctaacaaatatgttcaaataaccacaaccccacccctgctccttggaggacaacgtgatcactgtattcagctctgtcaagaatggtccaggttcttcataaattccccagtttccagtagttctttatagcagtgtgaaaacagactaatggacccttctggttgaaggaatgtagccattctgcttgtttaagtatttcctttctattcatctctatttcccgggaggtgtttatccaagtgcaataggagatattggtgactgcagagtcccctcagtgttctgctagtaaatagttgaaggttgatcagtgatctccagcattttcagtctggcatggaaaagcccccatgtaactggtaaaggtatcagtaagcaccaggaggtatctaaatccaccaggagccataggcatcatgttgatgtccatttaccagtcttccctggcaagattctctgaattgtactgccttggccaaaagaggtatgggaggggctgggcacagtggctcacgcctgtaatcccagcattttgggagaccaattcgggtagatcattagaggtcaggggttcaagaccatcctggccaacatggtgacattccatctctactaaaaatacaaaaagtcagcggggtttggtgttgggtgcctgtaatcccagctactcgggaggctgaggcaggataatcacttgaacctgggaggaggaggaggtggcagtgagctgagatcgcgccactgcactctagcctgggcgacagagcaagactccgtctcgaaagaaagaaagagaaaggaaattccccagggaagtacctcggcttatttcatgaagaggtactgaaggaagcagaggcatgtggaggacttccccacctcgtgcagctatttgggccgtggcgtctgaaatttcttatttcagagtcacccctttgatgaccttggcagtggactgcagtcatctgtttaggcctctccatggcccgtgtcaatgccgatatttctgtctgttgcacatttgatttccttgttgttggcatttagaaggccccctgtttcccagatcacaccacgggcatggaccgcagagattgcatcttgtgagtctgtagaaacagtcaaggccttgtcctctcttaggtccagagctcaggtgaatgcagattttcccggccatctgtgctgaagtccctgtggggaggctcctggctggtttcctgtaggtagacagctacacatcctgcccttcattggcttcttttcatgaagctcctgctgtctacaaaacatgtctcccttttcttcttgaaccacgtctctgttattgaaactctagaagtcagccaggcacagtggctatgcctgtaatcccagcactttgggaggccaaggtgggtggatcacctgaggtcaggagttcaagaccagcctggccaacatggcgaaaccctgtctctaatacaaatactaaaattagccaagcatggtggccactgcactccagcctgggtgacagagcaagactctgtctcaaataaagaaagagaaagtatcatgcttttcagagttctgtgggttgttatggtgaattatcaaacctgaggacgtggtgggaacctccaaatttgcagccagttggtgagaagtacatgcggtctgtggacacccaagcttgcagctgcatctgaagcgagggcagcctagcgggggctggtggccttaacctgtggcatttgatgtaacatcagggagttgacatcagaattacgtcacacaggccaggtgcagtggctcatgcttataatcccagcaattagaaaggcaagataagaagattgcttgagcttgagtctgagcccacagtgagctatgaccgcaccactgcactccagcctgggagacagagcgagactgtctccaaaacaaacaaacaaacaaacaaacaaaaaaaccctgtagcttgggatcagccttctcttctgttgtttttcttt

SEQ ID NO: 59134 - DNA, 483 bp, Homo Sapiens
  misc_feature (469)..(469): n is a, c, g, or t
  misc_feature (471)..(471): n is a, c, g, or t
  misc_feature (476)..(476): n is a, c, g, or t
ctctttcctttctttctggctctttttcacccaggctggagtgcaatggcaagattatagctcactgcagcctcaaactcctgggcccaagagatccttccgtttcagcctcctgagtagttgggaccacaggtatatgccaccacgcatggctacatttgttttgttttgttttgtttaagagaaggatgtctcactaggtttctcaggcctgtctagaactcctggactcaagccatcttcccacagtctcccaaactgctgggattacaggtgtgagctactgcaccaggcaggttttttgtctttctgtgagggaaatgtgggagagacagggagatgttttctatttttggcctctgcaagctttaatatattttgctagaagctgttttagtgtcttgagtactataatgatgactgtttacacatagtctctttagtaatctaaatgtctatgtgaaataanantccanttgtgcc

SEQ ID NO: 59135 - DNA, 532 bp, Homo Sapiens
  misc_feature (400)..(400): n is a, c, g, or t
  misc_feature (452)..(452): n is a, c, g, or t
accaagtaaaggacaaacttgtactgcatcctactttttagtaggcaactaaagcttaaaattatttgatcagacttttaaaacctctatgacaaacctttacgagtttctcaaagcgtggtctttaggctactgaaatttccaaagttcttctggaaggtttaccttttatatgacagcaatatgagactcactgccactagtcctacagtaaattaaaactatatctgcaacttcccccagacgtcaaatcaccatctaattattgtaaggatttttttccagataacaatagctggaatggggtgtttcagggattttttgttcaccccagtgggtattggtgaaatttgcaccatttccttcctatctccccaggaccacctatcaagagaagccntagtaaacgctcaacaaatgcttgataacccgataaaactactttaatctgnttaagaaaaataacctaaagaattggaataagccttggccttggtaaaaatatcaacttttccttaaaaggctctcagtt

SEQ ID NO: 59136 - DNA, 2445 bp, Homo Sapiens
aggaatgttggtgctcccagcacctagcaccgggagactggagaggtttccaggagagtgacccgagtaggtcccctcctaattctggagccgtccctcgggctgcgcagtggagcgccgaggtggcgggaggctgcggggagcctgcgcggccaagcaccatctgcagtcaggagctcccgggcagcttgcagggcgcagtttttgaaagcgggtgctgcgtgcggaccgcgggcctgcagggatcttttgccagaaatgagggcatactggcctgacgtaattcactcgtttcccaatcgcagccgcttctggaagcatgagtgggaaaagcatgggacctgcgccgcccaggtggatgcgctcaactcccagaagaagtactttggcagaagcctggaactctacagggagctggacctcaacaggtgggtgcgcccttcccccggctgcacttcccagtggggatctctgctgtcgcccaagcctgacagctggatccaggggagtgggtgtagacctcactgccctccagcagcttctgcatgtgcactattcgactactgggatcattcctgaggaatgttctgagcctaccaagcctttccagatcattctacatcacgatcacacagagtgggtgcagagtattgggatgcccatctgggcaccatctcatcatcagagtcggccatagggaaaacgatgactccaaccagcatgtgccgaactctgtggccaagacagtctgacaataagttattgcccacagaggatgtctaagtctttgtgtccactctgtgatcgtgatctagaattttctaccaaggcttgatggggaactaggatattcttctgcaatgattcagaattttacagtgtacctttatactttaataagtgaattctatatatggtagtttggtaggattctgtgtagaagtgctttaggaggtgattgaaagctgtagggacttaccatacggttatgtattgcttggtgatggggtataaaattgtcatgtgaacatcttggagtgcacttacttagctgatacagcccacgacacacatatgctttgtggtatagcctgttgcttcgaggctacaaacctgtacagtgtgtgactctactgagtactgtaggcacctgtatgtaacacaatggtaaggatttgtgtatctaaacatatctcaacatagaaaaggcacagtagaaatgtggtcatatgggaccgccctcgtacatgcaggccttcactgactgaatgtcgtaatgtggcgcatgactgtgtttaaagatttgtccaaatgcagtttaccaggataagcctggaatccgatttcaattgctgtcttttaaagcaggtgtggcaaacgggtggtgatgtgtgtgccagctccactcggtggtggccccagcgctcccatgctccgaaggagtcaggaactggaaagggtacctgcctggagcagtttgtgtgtgtgctaaggggtggggaaggcggggactgggaaccatgtatttgcagtccatgttgacacatttgttgcataaagtcatagaaaacactttcctttaagagtgtcttaatttttaccatgaaatatgatacctgaaaagaacaagaaagcaaagtggaccttcattatacagctaacttttttaaatttaaattttagtgtgcttctaaaattggggataaaaccatccatcaattactaccaagtaagtcttgcttttgcttcttttctcgtgtgtctctcccggggacctccagtagggccgtttcagcctctgagtcaatgggctgtaaattgccccagtgcaaacccccttcctacttaaatgttatcatgtgaacagattttatttgcattttattttcctgcgcatgttgagtaggagctgaaggctgcttagaccagtgatttggaagcacagatttcatggctccctttgtgagaagtgtgtgctccagggtccggcagagcaggtggaatctgcagtttgaagagtcacattcacttttataacgtagtcttatatttgtttgtggtttgttttcatgataaaattgtgatttgttttatgataaaagaaactatagatatttaagcatgacaagatgttattagctggtaagcatatacaaaaagttgctttttgccaggtgtggtgactcacgcctataaatcccaggaccttgggaggctcaggctggaggattgcttgtggctagaatttcgagaccagcctgggcagcagagtgagacctctagaaagaagtaaaagtagctgagcatgatagtatgtgtctgtggtctcagctattcaggaagctaaggtcagaggattgcctgcgcccaggaatttgaggctgcagtgagccatggtcgccccactgcactccagtctgggcgacagccagatcacgtctcttt

SEQ ID NO: 59137 - DNA, 3117 bp, Homo Sapiens
catgtttaattcctactatttattccataaggtactaagaaggtctgtgggaatccttgatacttacctgggcttagtttagctctaaaaaagtagcacaggagcaggagacttgatgagaacttaaaatgaagtgtctggctaagaccaggatagtcgagttgctcatgaaacctctggattcaccgctgggtaaatctggtatcatgattgttttgatcaccatttaaaaatgtcttttctccagttacaaataagatgttttatccaagaatgtgcactagcacaaaaggactttattttgcacaacatcttctctttgataggacacaattttctcaggcctgagttacatgatgggggtggtggctttgaggaacatggagggtctttttgtggcagctaagtcagggagtttcaggataaggatgctgggacatatttctgttaagcaggggattctggtggaaataccaggactttcttttactgcttacataaacactctggatcctctgtgcccactcagaaagtttagggagaaaagctgaaaaggccttgaattaatatctcagatgaaggacagtgccactaacagtctattaaaatacacattaaaaatatgtaactttaaatccctttggtttggtttaaaaaaaattaaagttttataatgatgcctttattcttttatttaaggtacttaaaaaatgtatatattatggccagatgcagtgactcatgtctgtaatcccagcactttggaaggccgaggctgttcttgaactcctgggctcaagtgatcctcccgccttggcctcccagggtgctggattacaggcatgagccactacacttgttcttattatttatttttaataccagatgatcatctctattaaaaacagaagtgagtgatatgatgtgtacaacagtgcacgtactgtatctttactgagagaatagtggagaaatacccttgtttgagtcatttcctgaacaataggatggggtggtttgtaaaccaaaatttggtctctgctttggtgaagctaagaatgcagttttgatcttaatatgctagtagccaacacaactgaaggtgatgcagcatttttacctcattagcagtgtcttaggcttagctggtaaggcttcaccagcttgcagtgcccaggaagctgacgtaataagcagcaggtcatgggcaacacggatgtcatcttggtccaagatacatccatcctgctgtgtctcatatttgttgtagaatgattcacatagaaaaaccattttgatttttcctgtcttttaaaaacaatacttcagtttgtcttcatgctttctgtaaagttgtatctccaatatgccggtttaattttgtatgaaactggaattttagatgaaaggctttctaatgcacaaaagaacctcagccctttctcagaagcacaacaaacacacacataaacaacaacaatagaagagttccaattaggattttcagaacacaaatacccatttaaatgtacctaacatttctctgctagaagccactttaaattattgttctttttaaaaggaaaatccaatatagttgaaagcttgtgctttataaatatgtgatgcttccctgcattatctgaaagagggagaaaaaccatgtcttgctttttgggatttaacctgttttagctgatcacaaaatctttattaattgcatttattagctatatagcactccaaggtctttgaaattttttggttgcaaaaatctgatgaaaaaattaaattgtatattatcttgtaattttgcaaaaagcatgtgattgagttgtgccctgccaatgacttctagtagcagagcaagcagtggtccttcctcaccatcgagagtggcgtcggggagtttcttgcagttacaacaaagcccaaattatggggacggtgaggggagtctttggccacagaataggtttgggtgtgagctgcactttctgccttgctaagtgtcagtttttctggattttacatttgtcttcctatagcttcagcttcccttctttcctttacttcctactgtggccttcattctcttcacttggtggtgatgagtaattttacacaaggccattttctctggacatagactgaggcagtgatgggatggtgaagtaccacggatagtaatcagggggaccacagataatggcagggagccagggtgtctaccctggctctgcactgactggcttggtgatttgtagagttcttagggactgactcatgtgcctgcaaaattcataggctgaaaccctaatcctcaatgtgactgtatttggagggcgggccttgaaggagataattaaggttaaatgaggtcataagggtggggccctaatccagtataactggtgtcattttaagaaggggaagagacatcaggcataagcatgcacagagaaaaggccacatgtgaggacacagataggaggcggccatctgcaagccaaggatagaggcctcaggagaaaccagccttgcttggcaccttgatcttggacttccagcctccagaactgtgagaaaataaatttctgttgttcaagccaccctgtgttattttcttatggcagcaatagcaattgctaaatacaaatataggagaaaaatgaagtctctctaggattccatttcccatcttgaagatggggctagaaatcgtttctacaatagagagttatatgagaataaacaacataatgtaatcaatatagtgcctcaattcatgccttctcatagatggagaatttatgcccacaagcacaggctagtgtccattttctaataactcagctttttgctgagtacttagcattaaaacaaaacaacacaaatcatttatacatgttaagtttcaagtttcccacttcattttgcctggctgatggctcttagaagacacaaacttatggcacagatgacttcttctggttctaacttgtgttatctctttttcaaaagttagttaaattctccatatattttagtgttgttctattggctagaaagacaaaacaaggggaatctggcaaatgtaaaaaaaaaaaaaaaaaa

SEQ ID NO: 59138 - DNA, 2243 bp, Homo Sapiens
atatctgggatcctccaatcacatctgagacctcctaggctctccatctgatatgccctctcagggaccccacaaagactgagttctcatggggatcctacccttcctagtgccactccctatggccatgctgaagaccactctggccacgcgactgattttgggtgatcatggcagctccccacccatgtcacttctaaccagaagtctcaaggtcgtcacccccctgccccccaaccgaggccccggtcgctggtggtggtctctttagtgcactgtagcacttggtggtggaggtgtgagggatccacattaacagcaggccatcagctgggcaacggctcacacctgtaatcccagcactttgggaggcgaggcagggggaatggcttgaacccaggcattcaagaccagcctgggcaacataatgagacctcgtctctacaaaacataacaaaaacaattagccgagcgtgggggtgaacacctgtggtcccagctgctcaggaggctgaggtgggaggatctcttgagcccaggaagtaggaggctgtagtgagctgtaatcgtgccactgcactccagcctgggcgacagagtgagacaccgtcttaaaaacagaaacaaggccgggcacggtggctcatgcctgttgtcccagcactttgggaggccgaggcaggcggatcacgaggtcgagagatcgagaccatcctggccaacatggtgaaaccctgtctctactaaaaatacagaaattagctgggcgtggtggcacgtgcctgtagtcccagctactcgggaggctgaggcaagagaatcgcttgaacgtgggaggcagaggttgcagtgagcctagattgtgccactgcactccagcctgggggacagagcgagactccgtctgaaaataaaaacaacaaaaacagcagaccattcaaaatagggagactttgcataatccagatttctgccttcacttaaaactttggacggtctggagagagtcggccagttttcggtggggggtggggagctggaacaggacagtagcctttcctaatgaggcatttgttctccaatctgccccagtcgctgccatccctggctatctcaccctagcagcttctcaagcctgttggctttagaccactgtataaacccagctggaactgaagcctgggtggactatggagccctggttggaacccccagggagtcaaaggctgcgggccaagaggccagaggtccttgagcctgggtgggcaggtggatctagggtgcatgacttgctgcttcccaaccttagtttgtcccttccgtgaaaaagggagagaaggaggaggaagatctcaaaaagactttccagcccagtgcggtggctcacgcctgtaatcccagcactttgggaggccgatgcaggtggatcacctgaggtaggagttcaagaccagcctgaccaacatagtgaagccccttctctactaaaaatacaaaattagctgggcgtggtggcatgtgcctgtactcccagctacttgggaggctgaggcaggagaatcgcttgaacctgggaggcggaggttgtagtgagctgagatcacaccactgcacaccagcctgggcgacaagagcgaaactccgtctcaaaaaaaaaaaaactgttgcagccccgttgagcctttgacaccgcctgaaatccaccccactcccaggaggaggaggaggaaggaatgccaatgacctagagacacgagaagtccatgtggaggcacacagcagctgatggcagagcccaggctgggacctgcccttaagagaatgagtgggaagggggagggaggaagggcaggtaaaacgtcctccccagggccccctgcaacggggaaggtactttttacaaaagctatcattgtcaccctaaatgtggaataaaataagatgcatcgacgtagacaaacctcctgggaccttttgtcagggactgcaatcctgcccctccactgaggccgctggctctcagagacaccgtgacatcacgggtgatgatgagaggagttcaaagagagaattatatgctggcgcggtggctctgtaatcccaacactttggggggccaaggcaggaggatcgcttgagtacaggagtttgaaaccagcctgggcaagatagtgagatccccttcccacccgtctacaaaaaaaataaaaaattagcgggaaaaaaaaaaaaaaaaaaaaaaa

SEQ ID NO: 59139 - DNA, 569 bp, Homo Sapiens
  misc_feature (556)..(556): n is a, c, g, or t
tcattcagaaagcctatacttggcctgttctgggcctgattagaaatcataataccttctcaacgcttcaacgacttgctgttaatacggggaaaacacacccccaaagccctgcgtgtgtcgcacaggcatgctgccttggcgatgctttatggaacttttttaaaactacgtctgcaatgtctgccccttaaaagagaaaagctgatgggcagcaaactgcagccatttctccatcttccttcgctttcccacccccatcctgggcagctttcccctccccccaatctcctggaggttgtggcattaagctctgcagttgtgtgcacattcaagtgtttatggcagagactggggaaaaaagagcaaattgtttccaagctagagctcccatgtgcaactttgctttagaaaagactttccatctggggaaagctcatattctgatgaaagaagggcaagcagtttatccatttaaaatctatggaaagttaaagcacagaaaccagcagcctccactttctttgctaggcgtgcctagctgatgtccacattnttcctggaataaa

SEQ ID NO: 59140 - DNA, 1280 bp, Homo Sapiens
atgccccaactttccggaggaggtggcggcggcgggggggacccggaactctgcgccacggacgagatgatccccttcaaggacgagggcgatcctcagaaggaaaagatcttcgccgagatcagtcatcccgaagaggaaggcgatttagctgacatcaagtcttccttggtgaacgagtctgaaatcatcccggccagcaacggacacgaggtggccagacaagcacaaacctctcaggagccctaccacgacaaggccagagaacaccccgatgacggaaagcatccagatggaggcctctacaacaagggaccctcctactcgagttattccgggtacataatgatgccaaatatgaataacgacccatacatgtcaaatggatctctttctccacccatcccgagaacatcaaataaagtgcccgtggtgcagccatcccatgcggtccatcctctcacccccctcatcacttacagtgacgagcacttttctccagggtcacacccgtcacacatcccatcagatgtcaactccaaacaaggcatgtccagacatcctccagctcctgatatccctactttctatcccttgtctccgggtggtgttggacagatcaccccacctcttggttggcaaggtcagcctgtatatcccatcacgggtggattcaggcaaccctacccatcctcactgtcagtcgacacttccatgtccaggttttcccatcatatgattcccggtcctcctggtccccacacaactggcatccctcatccagctattgtaacacctcaggtcaaacaggaacatccccacactgacagtgacctaatgcacgtgtgctctgcttttctcctcccccatcccttcctcattccttcaaccccttcccctaaccaccaccaccaccaccttttaggaagcctcagcatgaacagagaaaggagcaggagccaaaaagacctcacattaagaagcctctgaatgcttttatgttatacatgaaagaaatgagagcgaatgtcgttgctgagtgtactctaaaagaaagtgcagctatcaaccagattcttggcagaaggtggcatgccctctcccgtgaagagcaggctaaatattatgaattagcacggaaagaaagacagctacatatgcagctttatccaggctggtctgcaagagacaattatggtaagaaaaagaagaggaagagagagaaactacaggaatctgcatcaggtacaggtccaagaatgacagctgcctacatctga

SEQ ID NO: 59141 - DNA, 581 bp, Homo Sapiens
  misc_feature (330)..(330): n is a, c, g, or t
  misc_feature (380)..(380): n is a, c, g, or t
  misc_feature (395)..(395): n is a, c, g, or t
  misc_feature (409)..(409): n is a, c, g, or t
  misc_feature (467)..(467): n is a, c, g, or t
  misc_feature (478)..(478): n is a, c, g, or t
  misc_feature (495)..(495): n is a, c, g, or t
  misc_feature (511)..(511): n is a, c, g, or t
  misc_feature (519)..(519): n is a, c, g, or t
  misc_feature (568)..(568): n is a, c, g, or t
  misc_feature (578)..(578): n is a, c, g, or t
ggtagagatgtgagtctctctatattgcccaggctggtcttgaactcctgggatcaagtgatcctcccaccttgtgtttttaacgggtttggcacatgcatcccggtgcactgtaagagcctagcaaatagaaagtgttactggaatcatttagtgtgaaatcttacagcacccactctaataccagctccaagaagagggggatgtgcacctactttgtgctgtggggtatcccaagtgtccagaacaatgcctggcacatgtagacgtttaataaatacttgcatacatgaatgaatcctctatgtggcagatttttaaacaccgcangaaagacagctcagactcctccccgacccagcagaaagtttacctttcanggtagctacagcctnttccacttgaccangaaggaaagccccgctttcacgtcttttaaaagtaacccaatcggcttggcttgccgnggaagtccttnttaaggctttaacaaanctttcaacttgcttgnggaaccanggcccccagcccataagcttgacaccaaggccttacaaaggaaaaggangggcccattncct

SEQ ID NO: 59142 - DNA, 397 bp, Homo Sapiens
tttttttttttttttgttcactagtttttcctttattttcttgggtatacttaaatagctactttaaagttctattattaatttctattaagaaatgctgggtctttttttttttttttccttgattatgggtcaaattttcctgcctctttgtatggctagtaattttttaattgaatggtaggcattgggaataataccttgtaaggcatctggcttatgttatcttcctttaaatggtattgttttatttcttgttaaagaggattatttctgtttgaacttagtcaaatgtggtccataggctggctatttttgtaaatgaagctttattggatatagccatgcccatttgtttaatattaatatattatctggcttcttttgtgctataata

SEQ ID NO: 59143 - DNA, 1552 bp, Homo Sapiens
tttctttagaagttaaagacttttggaggaaaaacatttcagattatgtgttatagcttatagaacaaattaagtccttagctgagaatacttgtcaaaggaggtaaataaatattacataattattcctaatacaaattactcagcgaacatttgtttctatagtaaatatgctataaatagaattgttcactttatgattttttttctttcttcattttagcatttatgacattaacagagaacaggactatgtcaagaattctgagggtatacttggtgaaaatgaattaagaccaccctcccagctacattctctcttagagaagatcgagacagggtccctatcagaaaagagtgggtattaaactaagtgctataagtcataactaatgaatccagaatagaatgattaaaatgtttttagttttaatttagatcatgtaaaacaaaaagactttaaaggaagtctgatgtatacatttttctaggtcactaattttgtgccctatgaaaactttatgtaccccatagtcaagtacattttttcctatgattttttaaattttataattttagccaaatagttatagtttttatgtttaggtctgtgattcattttgagttaaattttatggtttaaggtagaggtttgaggttcatgtttttttcctccattttagttgttctgtagcagcatttattgcaaagatattctttctcaatggaattatactggcaatattgaaaatctgttatctggactctattctgttccattgatctatatgcattttctttgtatcattaccaccttgtcttgactactttagctttgtagtaattctcaaaatcaggtagtgagtccttcagctttgttctttttcaaaattgttttggcttatatctttcttatataaattttagaatcagatcatcagtttctgcaaactgagattgtgttgaatctgtagatcaattttgtgtcttaacatcccccagcaaagttagaaagccaggcagtaatatcagagggcacaagcccagattgaagctggaagacatagtgctccagaaaggtccttccaaaaaaaagaaaagaagctgctcaaaacagacaaaatctttgatctatctttatccagaggatattgttagttctctagaatttcaagctgaaataatgattggtaactgaaaattaagctattttaaattcagaaaagcaaaacacggtataaggaaagaacttgactacacagtatggctcatgcctgtaattccagcactttgggaggccgaggtatgcagatcacttgaggccaggagttcgagaccaacctggctaacatggtgaaatcccatctctactaaaaatacaaaaattagccgggcatgttgctgggcacttgtaatcccagctacacgggaggccgaggcaagagagttgcttgaacccgggaggtggaggttgcagtgaaccagaatcaagccacttacgctccagcctgggccacggagcaagactccgtctcaaaaaaaaaaaaaaaaa

SEQ ID NO: 59144 - DNA, 1799 bp, Homo Sapiens
attcaaacccagattcctaggcctgattcccacagtttctgactcgtgaggtgtgcatggtgccccaaatttgtttttctaacaagttctcatgtgacgctgatgctgctggcctggtttggggaccatactttgagaaccattggttcagaacatgaggctgcagcgcgccaaggtttttgcattgttttctattaaggaatagcctataagaaataggtttctagctttttaattttgttaccagcctagactctatgattgacagggtgaccagctgtcccagtttgccctggggcacaggattattcgtgctgaaaatgagaaagtcctgggcaacctgggatgaattggccaccttcactattgatccaacttcccaaatgctttgtctacattgctggtatctggctcggaggaagccctgtgggaaaggctgtgagtgtgttgccccaggttccacaggacacttagagtttgggggacacctgccgtcaacgcactgcaacaatctttagggatgttaattgttcctcaggaggcatacgtaggaatcacatccaccttaaacatgcccacttatggcatttgggctcacacagccaaacagctgccattgtctgaagtaacgcatgggctgttgggctcctacggtgtgacagacatacttctctgcatcatccatgtaccagcctgttttcttctcactgcagcccaatcagctaattatcatcatttccatctttcaaaaacaaatgcttaaagatgccattatttaccccagggtcacagatggtaaaagtgacagaaccacaggccaaacacttgttgttttaccatgtgactccaaggagcatgaaatctgaggctcttcatccatgagattttccagccactcacgtcccttcctctgttggagatgaagcctctccagagtggaaggcagtggacctagcttggatcaggatgcctggactttgctcctgcttcttccagataccggctctatgacttgtatcaggtcatcttttaacccctctgagcctcactttccgcatctgtgaaatggacatcataatgtctgccttaccttctgccttagcttgtcttgaggagaaatagaaatgatgtctatgaagctgtcagtaacgtgtgaaagcgctgtccctatgagcatatatgtgttaaaccttctgttattccaaaagagaggtttggcacatcaactcgaggaatatttacttaagtggaggagaaacaaagcaactaaagtagccaaaattagcagtgaacagaagaaaattctcaggaggaaaatggttcttcagctggttttgcaaggattagcaacatgtgtgtcccattccagagcagcaaatcacggcgtaggccctagccattttgctcagggaggactgcgctcttcgggaaaagttctgttgcaagtcacagattataggtgtgtggtagaaggccaagcctgagctgtcacttcctcagtgtcaaagggtctcattacatttcattacagtgattttctttttgctgaaacattaggaaccctggagcactgagccaagatcatggaacagaatcaccctctcctgcatgtttttgtttctgtctcctgcttttctgttctttttccactttctctatgtgtgagttgacttggctgcctgtagcttcatcgtcaaagctggtccacgtgggttcaacttggtgctctcactctcctccagcattgtttttgtcatcaaagctaaaattaaaaaaaaaaaaaaaaaaaaaaaaaaaaa

SEQ ID NO: 59145 - DNA, 2306 bp, Homo Sapiens
ggaggcaggagaatcgcttgaaccctggaggcagaggttgcagtaagccgagatcgcgccacagcactccagtctgggcgacaaagcgagactccgtctcaaaaaacaaaaacaaaaacaaaaaacaaacaaaaaaccataaattcacagttcagtggcaattttaaatggaaagacacgccttattcactatgatgcttttattgctaattcattcagtgaagaggaattatgcaaggtttaaaatggcttgcctgtcctggtatatccaaaactcttaattcagaagattcatctatttctccaagagaagaagctcgtggtggggctggaggaggttcaggctcaagatcaaagtccaatttggttactgtagaatcgcttatagaagataaagtaactcaccaaaacagtaatagaaagtctgtattttaaacagctttaaaattaaagcaaacaatttactttttaagtaaacagaacactactttcaaaatactacttgggaaaaaagcaagactcagtacacctgctataatcagtacgtaagaatgtcccaataactttgtataagagatgcttaaaatctcagacacatacctagctggaggtgctagttgagggatgcgtacatcaaccactggcactgtagtaggcacaggagcttgagggctgaaggtgccagaatgatttactgtaggaatagctcttcttactagccttccccaagtggcaatattaatattcatttgaggagctctgagaaatgttttgccttgttgctttgaaaaaattttcttttgtctttgaagttttggtcttctttcaataactggattaaaaaaggtaacctctgcaaataaagtaccctgtggttccaaatagagacacatgccatgccgttggttgtctaaaaaatcttctaacctcagaaaattttacagcacacagagaccgccaatcacgccaataaactgaaatttccagttcacgtgacctgtccagttccagtgtaaacttctggtcccatgactgattggaaatgggtttccagctagtttggccaaccacagtattatcgagcttcaaaacagcacagacatcattggacaagtcatcggtttttagaagatttcgactacttccgcttttacttttactcgttctgctcatgaaagatgatctggtttcacttggactccaaccaggcagtgcaactgatgttgcttttgaccgtccagggacattctctaggatatcttggcagcccataagacgaacttccaaagtacctgttagtgctgctggtttggatagtgtactatattgattttgcgtagatatcatactttgacgtggacttagtgttggtgatgcagcaacaagtgaaagttcttcaataataatcctgcttttgggatgattcttggggacttcgtttaatctttgctctaatgaatactttaaaaggtccaacttctgacttgattcattaaatcttgcttgagcttctgaaagtgcttttctgtctgttacttttcctgagccaagtaatttcattacattctttgcaccttctgctactgcaaactctatcctaaaatgatgccttaattcttccatccgaagttcaagaggacttatcacaggttttgcattatcaaaagccaattcattagtctggactgcctgaagaatctgcattcgtatgacttctatttttgtcttgctgtcctggagcagttgctgagctgtaccatggagtttccgatcctttgaagatccatttgaatacatctgtatcatattctctgcaccttgttttactttaagttctatatccaattgtttttgtagggccttcaatctattggtgctagtagaacaacgagggtcattatttggagtatctggagtccttgggcaatctgtaatatcttctggatctgatacaacaatatgtgcatttaattcctgcagcttgtgatgtagttcttctaatttttatttgattttttcaaaatgttgtctacataagccaaactttttttatctgttgtgactttcctcagattttcagctccttctttgattttcagttctttccttatttctctcttaattcgatccttgatatcatccaatttctgctgcaccattgtatctgaaaagtctaatttttgaacagcactcacattctcagaaaacggaagacttcgggaatccccctgcagttccgtgagcagaatctccccccgttcggggttggacgccattgcgctccggtatggactccgcacctggac

SEQ ID NO: 59146 - DNA, 1191 bp, Homo Sapiens
ctggatctggggtgtaagaactgtgacttcagatcatccaatggcagaccagagaatggacatttcttcaaccatcagtgatttcatgtccccgggccccaccgacctgctttccagctctcttggtaccagtggtgtggattgcaaccgcaaacggaaaggcagctccactgactaccattcactggtcgaatttggggagcacaatggctggaggtcagatgcccactaggagatgctatgattaatatagaaagcatggacacagacaaagatgaccctcatggaaggttagaatatacagaacaccaaggaaggataaaaaatgcaagggaagctcacagtcagattgaaaagcggcgtcgggataaaatgaacagttttatagatgaattggcttctttggtaccaacatgcaacgcaatgtccaggaaattagataaacttactgtgctaaggatggctgttcagcacatgaaaacattaagaggtgccaccaatccatacacagaagcaaactacaaaccaacttttctatcagacgatgaattgaaacacctcattctcagggcagcagatggatttttgtttgtcgtaggatgtgaccgagggaagatactctttgtctcagagtctgtcttcaagatcctcaactacagccagaatgatctgattggtcagagtttgtttgactacctgcatcctaaagatattgccaaagtcaaggagcagctctcctcctctgacaccgcaccccgggagcggctcatagatgcaaaaactggacttccagttaaaacagatataacccctgggccatctcgattatgttctggagcacgacgttctttcttctgtaggatgaagtgtaacaggccttcagtaaacgttgaagacaagaacttcccctctacctgctcaaagaaaaaagcagatcgaaaagccttctgcacaatccacagcacaggctattttggcatatttaccacaagaacttctaggcacatcgtgttatgaatattttcaccaagatgacataggacatcttgcagaatgtcataggcaagttttacagacgagagaaaaaattacaactaattgctataaatttaaaatcaaagatggttcttttatcacactacggagtcgatggttcagtttcatgaacccttggaccaaggaagtagaata

SEQ ID NO: 59147 - DNA, 442 bp, Homo Sapiens
  misc_feature (54)..(54): n is a, c, g, or t
  misc_feature (103)..(103): n is a, c, g, or t
  misc_feature (198)..(198): n is a, c, g, or t
  misc_feature (207)..(207): n is a, c, g, or t
  misc_feature (256)..(256): n is a, c, g, or t
  misc_feature (284)..(284): n is a, c, g, or t
  misc_feature (352)..(352): n is a, c, g, or t
  misc_feature (363)..(363): n is a, c, g, or t
  misc_feature (434)..(434): n is a, c, g, or t
ttttttttttttttttttttttttttttttttttttttttaaagttagtcaagngaagcagtgagagtggagaaggaacaaataatctgtaactagttgtgancaattagttgtaaacaccactgcactcggaccagcgcaaactcattcttaacctaatcacctaaaataattcttatcatctattcttcttcaggnaaaaatggngccctgggtgttattttaacgacttgccatccttcctgttttgagagtntctttgttaactgggggcataccttcgngacccggtcctaccttcctcattcagacctgtgctgttcattgctgtattcccagtcccttaaaaagnactcaacacgngaattgcaaaatgaattaacaactttgaggggagggtgttattatcatccgggggttttacagatgagggnaaccaagg

SEQ ID NO: 59148 - DNA, 553 bp, Homo Sapiens
  misc_feature (525)..(525): n is a, c, g, or t
  misc_feature (549)..(549): n is a, c, g, or t
ctgaaattgacctggtagagccttcaatgaccctttgaagaacaaggtgcaaaagattcacgtttgagattaacaggagggctgcacagaataaagccttcaattcaacatacaactatcaaattcagaaaaaaacatatcatagcctaaaaaggaaaaaattcctcaccagagaaaggttgataaaatgcaaatttaaaggtgtaaacctgtgcagagaccatggagttatgaggctcactgaaggggaaggaaatgccagatcattcttatttcaagaagcttcaggctgaatagttgcttggatatgctaagtttttctttttctttttctaaatcaagtagtgctactgaaatccagtgcctaatggagcagatggtggaggtcttagactctggaacatttatagtgatgcttctgaatgcaaaacaccaagagtggatttcacaggctgtgaatctgatttgattttgatgggagtaaagcttccattttcactggcttgaccccattggaaaaaagcntgtgtgactggcacaactttttanaaaa

SEQ ID NO: 59149 - DNA, 572 bp, Homo Sapiens
  misc_feature (510)..(510): n is a, c, g, or t
  misc_feature (513)..(513): n is a, c, g, or t
  misc_feature (515)..(515): n is a, c, g, or t
  misc_feature (521)..(521): n is a, c, g, or t
  misc_feature (549)..(549): n is a, c, g, or t
  misc_feature (571)..(571): n is a, c, g, or t
gtagagacaaagtcttcccttatccaggctggtaagctggtcaaactcctggctttaagctatcttcccagctcagcctcttaaagtgctgagatttatatctatctgtctgtctgtctatgtatctatctgtctatgtatctatctatctatctatctagtatatattaaagcaaacaaagtcaaatctcaaattcatctaactcagtttcagtggttttcactgtatcttttctaaaataaaatttaaaagaaacattttaatatattcattcaatacatgaaaatacacacttttgtggatcttggctgcttcacatatttgaaatgaggactaatgcgaagtattatcaggttacaatttttttaaggcacttcttaattttgtatattaaatttgtgactatacagcaaattttctttctataatcattgaagaatttttgctaaaggaaatatttttaggtgtctcagatctaaacagaagtgaagttgagaataaaatttcanggngnattatncatatccaaatatgctggcctacattcntatattactttctaaagggctna

SEQ ID NO: 59150 - DNA, 1002 bp, Homo Sapiens
caaactgaatcctgctttaattcaagcttgtggagaacaaagtcctacagaaacattccacagaattttctggaaaagagggatcacaacaaccctgtaaaaaggtgagaaggaagccaggacagcgcagtccccagtcccgaacggccagggagaggaggtggcctagcgctggcggggctcaccccaatccgtctgccttttgatgccgtactctgctggttgcgcacgcacctcgggatactgcacacggagaggagggaaaataagcgaggcaccgccgcaccacgcggagacctacggagacccacagcgcccgagccctggaagagcactactggatgtcagcggagaaatggctttgagctcagcctggcgctcggttctgcctctgtggctcctctggagcgctgcctgctcccgcgccgcgtccggggacgacaacgcttttccttttgacattgaagggagctcagcggttggcaggcaagacccgcctgagacgagcgaaccccgcgtggctctgggacgcctgccgcctgcggccgagaaatgcaatgctggattctttcacaccctgtcgggagaatgtgtgccctgcgactgtaatggcaattccaacgagtgtttggacggctcaggatactgtgtgactactgacggagaagacccaggtttttcagcttctaccctatcgttcattctcagctctcagggagccagagaagccagggctccaacatgaacacttcttgtagctcactgtcatgaccagtgtttcagtcagttctttcaggttgcctgacttacctcatttctctcatttcctgtaagcaaccaaaaataaaaggctttcttttatttcattttgtcttattttgcttttatcttgaaggcatataagacctctgtatctgccttgttcaccttcaactgcttctaattcttcctcaattccagtgtccaatgtcaatttgaaattaaaatttacagactgatttt

SEQ ID NO: 59151 - DNA, 1705 bp, Homo Sapiens
gagtcggagcactatccgcttccatccgtcgcgcagaccctgccggagccgctgccgctatggatgatcgagaggatctggtgtaccaggcgaagttggccgagcaggctgagcgatacgacgaaatggtggagtcaatgaagaaagtagcagggatggatgtggagctgacagttgaagaaagaaacctcctatctgttgcatataagaatgtaattggagctagaagagcctcctggagaataatcagcagcattgaacagaaagaagaaaacaagggaggagaagacaagctaaaaatgattcgggaatatcggcaaatggttgagactgagctaaagttaatctgttgtgacatcctggatgtactggacaaacacctcattccagcagctaacactggcgagtccaaggttttctattataaaatgaaaggggactaccacaggtatctggcagaatttgccacaggaaacgacaggaaggaggctgcggagaacagcctagtggcttataaagctgctagtgatattgcaatgacagaacttccaccaacgcatcctattcgcttaggtcttgctctcaatttttccgtattctactacgaaattcttaattcccctgaccgtgcctgcaggttggcaaaagcagcttttgatgatgcaattgcagaactggatacgctgagtgaagaaagctataaggactctacacttatcatgcagttgttacgtgataatctgacactatggacttcagacatgcagggtgacggtgaagagcagaataaagaagcgctgcaggacgtggaagacgaaaatcagtgagacataagccaacaagagaaaccatctctgaccaccccctcctccccatcccaccctttggaaactccccattgtcactgagaaccaccaaatctgacttttacatttggtctcagaatttaggttcctgccctgttggttttttttttttttttttttaaacagttttcaaaagttcttaaaggcaagagtgaatttctgtggattttactggtcccagcttttaggttctttaagacactaacaggactacatagaggctttttcagcattactgtgtcgtctccgtgccagatgtggcaagatcaccattagcaaatggaaattacatttgaaagccattagacttataggtgatgcaagcatctaagagagaggttaatcacactatagaggcaataagtggtatcagttttcatttttctaattgtttaaactgtgttttataccagtgtttgcaagtaattgggtgttagcttgagatggttaaaggtggtttggggagggacttcgttgtaatggttttgctgttgctgaaaagcatggtgctggtaacagttcaacaatccgtggctgctcattcttgcctactttactctcccactgaagcaggttagctgttgaaggtggtatggaaaagcctgcatgcctgttcaattcttttgtttcttctccttccccctccccctacctccttcccctcactcctcccctccttcgctcgctcaacctcttttgttcagtatgtgtaacttgaagctaatttgtactactggatatctgactggagccacagatacagaatctgtattgttcttactgaaacacagcatggaattaacattaaacttaaataaaacaaacctaaattaaaaaaa

SEQ ID NO: 59152 - DNA, 558 bp, Homo Sapiens
  misc_feature (435)..(435): n is a, c, g, or t
  misc_feature (437)..(437): n is a, c, g, or t
  misc_feature (496)..(496): n is a, c, g, or t
  misc_feature (506)..(506): n is a, c, g, or t
  misc_feature (555)..(555): n is a, c, g, or t
ggagacaagctctcggtctgtcgcctaggctggagtgcagtggtgtctaagtgcttttttgaagcaagagtttaatcccttattgctaaattgtagatttttatttttatttttggtggtatatgtggactctaaaaattatatgttctctcttttttcaggttttctttgtggcctaagttatagttgatttttacaagttaagaaaataatatgaattatttatttgaagggtgctgttaaatatccattaatcattttttgattcgatttaattaaagcctctatatcttttatttactttttcatctgcttgctttattgaagtccaagggtggttgtgagtttattaagttacttttctccaacgttttacacaattatatttgcacaaactttgctctttaatcactgggccacccaagagtagcacananggtgctctttcaaggctctcttgggcagaaggaaaatcttccaccccaataaatcttgnttcccgttgngggggggggagcttatctgccaaaggggggtggcaattttttcccccgnggg

SEQ ID NO: 59153 - DNA, 1810 bp, Homo Sapiens
ttgaatcaaacttttaaaacagagatacagaaaactcttcatgaaaagatttttttgtcttcctttctttgtatgtttgatatacagataactgttaacagtattctgatttccattattcacatttctgtagtgacaaggatcaagtatctgcaggcatttctttgtcccgggaaaagcagattttttcaaggaaatgatgtgttgatatataatagaacatacataaatacttttgctagctgtgcagttagttagaaagtgttgatgttttgacattgggtggctgttggtcactgcagatggaattgctgaaagaaatttacataacctgttaagagaccaatcattgttgcactagattaggtactcaagttagtttacagaattttgattatttttggttggcttggtatgagattggctttcgattatatgcttcaattgggtctaatgactcttccctgtcattgtaaatggaatcagtggagataggtcaatgacaaggttgattatagaccagggcttacagaagctaatcatctgcagtcttcatttacatacatgcttctgctgttggcttccagccaaggctggtgtagtatagtacatgaattttggagtcattattgatcatatatttccaacaagtgtgatgaggtggagttggcttaagttgaaatgtttagtggaaaacattggttcgttaaaagtagcagtggatctacagctcttttttgagaatgaattgctattatgtttgctgtctacactgaggtgtggcatgaagcctttctctcgtctccttcataccttggtggatctgtgtttccggacacttttccttttgaaagttgagatcccgttcagaggctgacagacttgtccctagaagaaagggtggcttctgtcaacagacgctggactgtgcagggcagctgcagtggttctggctggttgctgtggtcagtgggagtcgtggcatgttcctgggggcagtcacatctctgaacatttcctttatgacagttagtgcagttttaaaaaaggaaaaatcttcaatgttaaccttttttctgtctcttatttctaccctttaagattatctttatgacttctaaggatattttaagctcacagtcacacttggaagcagtgcccttgtaaggctctgcctagtgtggctgtattagaaaggtcattcctggttcttacatgtgcttctcctttccacgtctcccactggcgtgctgactttccaaggggaacgtgaagctgtccgcagtccttgcccttgccctttcttttggagactgtgtgaatgagcagcagccactttaatgtgaggcagccatataaacaatgaactttcacttgctgccaggaggtcataaactcaaggtcaccaaatgaattctagcttcagctcttggtttagtaatgtaccaagtttggtattactttttgtttgttttaatcaggtttctgccctcatcttctatttgggaaattaaaactggtctgttggcatggctggtgacagagcggcaggcacattcttagtctctgactttctgcagccatctttgagtgcatataagtgttgggtaacagtctactgaatgtgctacaagtgtgcggagttgcgttcatctttaacttgttttttttaaaaaacactctcttggtaaattgggatctcctgttgaaaactgtatttgtttggcagttgagtttatgcctggagcccctagagcacatttaactggttggtggtcagttgtaccatactgaaaaaaaaaaaaaaaaa

SEQ ID NO: 59154 - DNA, 573 bp, Homo Sapiens
  misc_feature (442)..(442): n is a, c, g, or t
  misc_feature (446)..(446): n is a, c, g, or t
  misc_feature (515)..(515): n is a, c, g, or t
  misc_feature (541)..(541): n is a, c, g, or t
  misc_feature (545)..(546): n is a, c, g, or t
  misc_feature (548)..(548): n is a, c, g, or t
  misc_feature (567)..(567): n is a, c, g, or t
cggcaactataggctttattttcttgccaattctttacagaactgtaaggcagttgcttctttcttccgttgtagatagtcttctgttattgctacaaactgggattaatttttaagcttcaaagttacattattgccagacgcagtggctcatgcctgtaatcccctgcactttgggaggctgaggcaggtggatcacctgaaggtcaggagttcgagaccagcctggccaacttggtgaaacactgtctctactaaaaatataaaaaattagccgagcatggtggcaggcacctgtaatctcagctactccggaggctgagacaggagaattgcttgaacccgggaggcagaggttgcagtgaactgagattgtgccgttgcgctccagcctgggcaacaggagcgaaactccatctcaaaaaaaaaaaaaaagggaaangaangttacattattattgggaataaatatctgcatttccttaagcctttggcaggctatgttaccccctatntttggagaaggaccttgaaaagtganggcnngnccttcaccttatacctgcntttttt

SEQ ID NO: 59155 - DNA, 2436 bp, Homo Sapiens
tttaagttctcttgcacacccagttcccaggcatggctctccaatctcagctccctcctttctctccggattttaggtggttatgatggatgaccaacctctgacctttgactttcgtactgaggtctcagcctttgcagcttctccctccaaagcagcttttcttctgattcctgatctcagttcagtgctcaaaatagcctctccttattttctcctggtgtcagtgttaggcctgaataacatctcatgctgttcgttaaacagatgtctgctgccaaaaagttgttctgatagaaaatccaaaatcatcgaccccaaaagccaagtctgtcattgggctaaagtgccattcctactaatcctttgcctcacctgattcatttggaataaagggccaggagcttgagtcacccccatgccaggacctctgttgctatttgctggctgctggagaggtggggtcttgcgggccctggagaggtggggtcttgtggggcagagctggagcagatgctgcatccagcagtaagcatgagaatgagcactcacagttttgggtcctgtgctggacactgtgcaagtcctgtgcatatatcacctgttgcatttcccacagtgacccaatgaagtagatactgttatctttaccattttatagatgagcaacctgaggcttcaccagaattgcacagtgagaatgtggcgtggcctggattctcacgtcgggagtcggattgcaaagccttactgggcctcgccgcgccccatggctgtcagcgcattccatgctgacctggccgtgtatgcgtgcgtgtgcacgcatgtgtgtgcgtacgtgcacgtgtgtacatgtgtgtgtgcttgtgtgcacaccacatgtgccgtgtccataggtctgtcatcatatcaggtaggactaggtcggctcatagcttggaagggctttggagacagccactctcctaacagatgggagaagttgttttgattcttactaaggtcccagaatcctattgatggctttgctgagtattgaaaggctggccttaaattaggtttgaaactgaatttggtaataggacaggatgtgttaaggaagggaaacatacagggagctgcctgctctggcagctgttgaaagtgagcaggccacggtgcctgcagtgggagtggggcagcaggcgtgtcaccttgggccagagcacatgtcttgtacacggttgcaccaatgcgtgaggatgtaggtccccaagagccaagagaaggggagctttgttgaatacgtgatattggagaaagctttggcccaaaagaacaaatttagattcgttctctctgcaatacaaatgtattccagtgggtcaaaatgttaattattattaatttctttttttgtttcttgagtcagggtctcgctctgtctcccaggctggagtgcagtggcgccatctaggcttactgcagccttgacctcccgggttcgggtgattctcttgcctcaccctcccgagtagctgggattacaggcacacacctccgtgcccagctaatttttgtacttttagtggagatgggatttcactctgttggccaggatggtcttgatctcctgacctcgtgatccgcccacctcggcctcccaaagtgttgggattacaagcataagccaccatgcccagcagagaattcaaaattcttaacaggatacttataaataaactgtgtaagaaagaagtataaatagtctaaaccagaagaaaaacatttaacttttttttttttcttctgagatggagtttcactcctgttgcccaggctggagtgcagtgacatgatctcagctcactgcaacctccacctccctggttcaagcgattctcctgcctcagcctcccaagtagctgggattacaggcgcccgccaccacacccggctaatttttgtatgtttagaagagatggggtttcaccacattggccaggctggtcttgaacccctgaccttcaggtgattcgcctgccttggcctcccaaagtgctgggattacaggcatgagccatcgtgcccggcaacatttaaacttgactttccatttaataccggtttttttaggtggggcatgatggctctgcaatcccagcactttgggaggctgagaggggtggatcacttgaagccaggagtttgagagcagcctggccaacgtagcgaaaccttatctctactaaaaatataaaaatgagccaggtgtggtggcatatgcctgtgatccccatgacttgggaggctgaggcacaggaattgcttgaacccaggaggcggaggttgcaatgagccgagagcgcgccattgcactccagtctgggtgacaggagtgagaccctcaaaaagaaacccgtttttgtgatgtgttgtcattcttcctgagaattc

SEQ ID NO: 59156 - DNA, 549 bp, Homo Sapiens
  misc_feature (396)..(396): n is a, c, g, or t
  misc_feature (459)..(459): n is a, c, g, or t
  misc_feature (475)..(475): n is a, c, g, or t
  misc_feature (544)..(544): n is a, c, g, or t
ctttctataaccttgaaagaatacctgcccttctctaaaatgattcaactagggctgcttaccaggcccacagaaagccctgctgccagccggccttcaaaatggattaaggatttggagttctcttcatttctccactcacaggatcaaagggtgcgggcgaggactgggaagcgggggaggaaatgcaagatggaacaggccccaagtttttaactggcataagagcaactgtggttcatcctaggctcagctgagctgcagggagcaggcccccatgatctgtacagcctgtgcccttgagaaataaacacaactgccagaaagcagcacgcttcagctactgctaatcccaggctacaagacaagcaggaaatcagaggtgccctgtgatgngttttccaaaaagcgtcagcaagtacacagagcaaggaggaaggggacagtccaatgcaaatncccaattggggttcanaacagggattaaagcttgaaccccagacagccccaaccgagggcccccaatgctcatcttagccttgantcctg

SEQ ID NO: 59157 - DNA, 387 bp, Homo Sapiens
tttttttttttttttttccaaacaacagcattctaggcagaaagtcacaaaacaggaggaagcgagtctgattcccagcatcagataaactgctaaactctactgtgggtaagaacaaaactgtgcttaccagaaaacttaatttttatttcgatgaatttctaatagtgaaataaattactttaaagcacaacaaagaagaaagtcaacacccaaacgttcttgggctcaggaagtatggtgcttgacgggagggttaaaagctgtcagccctgaagacaggcaggaaagtctctctttatgaccccctcccagcaaggctgtgttttttcaacacttctaacccttctgcatgggaatcttggaatgtttttttgttttgttttg

SEQ ID NO: 59158 - DNA, 2311 bp, Homo Sapiens
ggcacgaggagagagggagcgtggagagctggagcagccgccaccgccgccgccgagggagccccgggacggcagcccctgggcgcagggtgcgctgttctcggagtccgacccagggcgactcacgcccactggtgcgacccggacagcctgggactgacccgccggcccaggcgaggctgcagccagagggctgggaagggatcgcgctcgcggcatccagaggcggccaggcggaggcgagggagcaggttagagggacaaagagctttgcagacgtccccggcgtcctgcgagcgccagcggccgggacgaggcggccgggagcccgggaagagcccgtggatgttctgcgcgcggcctgggagccgccgccgccgccgcctcagcgagaggaggaatgcaccggccgcgccgccgcgggacgcgcccgccgctcctggcgctgctggccgcgctgctgctggccgcacgcggggctgctgcccaagaaacagagctgtcagtcagtgctgaattagtgcctacctcatcatggaacatctcaagtgaactcaacaaagattcttacctgacccttgatgaaccaatgaataacatcaccacgtctctgggccagacagcagaactgcactgcaaagtctctgggaatccacctcccaccatccgctggttcaaaaatgatgctcctgtggtccaggagccccggaggctctcctttcggtccaccatctatggctctcggctgcggattagaaacctcgacaccacagacacaggctacttccagtgcgtggcaacaaacggcaaggaggtggtttcttccactggagtcttgtttgtcaagtttggcccccctcccactgcaagtccaggatactcagatgagtatgaagaagatggattctgtcagccatacagagggattgcatgtgcaagatttattggcaaccgcaccgtctatatggagtctttgcacatgcaaggggaaatagaaaatcagatcacagctgccttcactatgattggcacttccagtcacttatctgataagtgttctcagttcgccattccttccctgtgccactatgccttcccgtactgcgatgaaacttcatccgtcccaaagccccgtgacttgtgtcgcgatgaatgtgaaatcctggagaatgtcctgtgtcaaacagagtacatttttgcaagatcaaatcccatgattctgatgaggctgaaactgccaaactgtgaagatctcccccagccagagagcccagaagctgcgaactgtatccggattggaattcccatggcagatcctataaataaaaatcacaagtgttataacagcacaggtgtggactaccgggggaccgtcagtgtgaccaaatcagggcgccagtgccagccatggaattcccagtatccccacacacacactttcaccgcccttcgtttcccagagctgaatggaggccattcctactgccgcaacccagggaatcaaaaggaagctccctggtgcttcaccttggatgaaaactttaagtctgatctgtgtgacatcccagcttgcggtaaatagaagtcattgcccctaatgtattcaatcatctttaaagatccctatcctacccctcttatttaggagaatcctataagggggacaaagaaaatggacagtatttgcttgatctcaatctggttttagggtaaaccttgccgtttctacataaaacacctcgtaaggtaccaaaacacgttctcaagaagtcaactgcctttatacctgcagccattgcactcgtggatgtaacagggacccagcccttcagaggcacagttgagacagtttatcacattgatttttatagaaaaagatgttacccagaatggtctgcgtccaagtggaccttttcagcaaaaaaaggaatattggaagcaggaagaaattgttttctgtatgccttaagaacaccacaaggcaggatgaatctacaaccattactcggtcatccagggcaatctgtgggtaaactgtgtccttcgttatgtctgttaatactgcagaagaagcatataggtatctagtaagaaaatggaattcctgagtcagttaactgttcctttttctagaaaatgtttggagaaaataatgaaaatgggccaagcatggtggcttatacctgtaatcccaacactctaggaaggccgaggcaggaggatcatttgagcccaggggttcaagaccagcccaggcaacatagtgagactccatctctaccaaaaaaaagaaaaaaaaaaaaaaaaaaaa

SEQ ID NO: 59159 - DNA, 1894 bp, Homo Sapiens
ggcacgaggaagacacccaaggacaatgctgctactctacaaccatctgatgacaccgtgttacctggcggtgtcccttcccctggtgccagtctcactagcatggcggcatctcagaatcatgatgctgacaatgtccctaatctcatggatgaaaccaagactttctcatcaaccgagagcctgcgacaactctcccaacagctcaatggtcttgtttgtgagtctgcgacatgtgtcaatggggagggccctgcatcgtctgctaacctgaaggatctggagaaacaacagaaccaagaaattacggatcagttggaagaagaaaagaaagaatgccaccaaaagcagggagccctaagggagcagttacaggttcacattcagaccatagggatcctcgtatcagagaaagctgagttacagacagccctggctcacactcagcatgctgccaggcagaaagaaggagagtctgaagatctggccagccgcctgcagtattcccggcggcgtgtgggagagttggagcgggctctctctgctgtctccacgcagcagaagaaggcagacaggtacaacaaggagttaaccaaagggagcaggcggaggcgcgcaggcaaatcctggagaccatgcagaacgaccgcactaccatcagccgcgcactctcccagaaccgggagctcaaggagcagctggctgagctgcagagcggatttgtaaagctgactaatgagaacatggagatcaccagcgcactgcagtcggagcagcacgtcaagagggagctgggaaagaagctgggcgagctgcaggagaagctgagcgagctgaaggaaacggtggagctgaagagccaagaggctcaaagtctgcagcagcagcgagaccagtacctgggacacctgcagcagtatgtggccgcctatcagcagctgacctctgagaaggaggtgctgcataatcagctactgctgcagacccagctcgtggaccagctgcagcagcaggaagctcagggcaaagcggtggccgagatggcccgccaagagttgcaggaaacccaggagcgcctggaagctgccacccagcagaatcagcagctacgggcccagttgagcctcatggctcaccctggggaaggagatggactggaccgggaggaggaggaggatgaggaggaggaggaggaggcggtggcagtacctcagcccatgccaagcatcccggaggacctggagagccgggaagccatggtggcatttttcaactcagctgtagccagtgccgaggaggagcaggcaaggctacgtgggcagctgaaggagcaaagcgtgcgctgccggcgcctcgctcacctgctggcctcggcccagaaggagcctgaggcagcagccccagccccagggaccgggggtgattctgtgtgtggggagacccaccgggccctgcagggggccatggagaagctgcagagccgctttatggagctcatgcaggagaaggcagacctgaaggagaggccagggagggttctccccgtgacaaccccactgcacagcagatcatgcagctgcttcgtgagatgcagaacccccgggagcgcccaggcttgggcagcaacccctgcattccttttttttaccgggctgacgagaatgatgaggtgaagatcactgtcatctaaaagccggctactgtcagcaaagcctgaagaagtggggctggataccctgcccccaccatatccctaccatcccttctcagtcaaccctttacccttacagtagcaagcatagacccctgtctaacgggggtagacaggtgcagatgaggtgaagatcactgtcatctaaaagctggccactaaattaaaaaaaaaaaaaaaaaa

SEQ ID NO: 59160 - DNA, 553 bp, Homo Sapiens
  misc_feature (482)..(482): n is a, c, g, or t
  misc_feature (515)..(515): n is a, c, g, or t
  misc_feature (545)..(545): n is a, c, g, or t
  misc_feature (553)..(553): n is a, c, g, or t
gtaaataactttttaatgatcagaaaataacattcaaaataaaataatgtaagttcctaatcacagtccacaatcaaacatatttttcaaatggtatcgtctaccatttcttgggtagggcatatagtaataggggcaagtgagtacttctaaacacaatatacatatagaataattaccacatataagcattagaatacttttttttttttttttgagacacctaggctgtcacctaggctgtcacctaggctggaatgcagtggcatgatcccagctccctgcaacctccacctcccagcttcaagtgattcttgtgcctcagccacccaaatagctggaactacagcatgcaccaccacaccaggctaattttgtatttaactcctgacctcaagcaatctgcctctctcagcctcccaaagtgttgggattacaggcgtgagccatcatacccagcctactttttaaaagataaaggncctatagctttacatcaaagctgaatgaccatncaattggatccatcttttaaaagccttaanttatagcn

SEQ ID NO: 59161 - DNA, 1454 bp, Homo Sapiens
cggctgaagacggcctatgtggcctttttttttttttttttatattttgagaaacctccatactgttttggcatagatagtggctgcacaattttgcattcccacccagcatacaagggttccaattcctccatatcctcaccaacactcttttgtttttttgatagtagtcatcataacaggtgaggtgatattaaggagtacttctgcactgaggcacttgtctcaactatatttttgttgtactttcaggagactaatagatctgtggaaatttatcaaatctttgctcatttttttaacttctgagagctcttctttaatctgagtgttcctttttatgaaattgttgatgaaaaaagccgaacaagtgtaaaatattttaagagatttattctgagccaaatatgagtgaccacagcccatgacacagccctcaggaggtcctcagaacatgtgcccaaggtggctaaggtacagcttagttttatatattttagggaggcataagatatcaaatacatttaagaaacacattggtctggtttagaaaggtgggacaactcaaagcaggggcttccagactataggtaaatttaaacattttctggttgacaataggatgagtttatctgaagacctgggatcaacagaaaagaaatgttcaggttaagataaaggattgtggagaccaagtttcactgtgcagaggaagctctcagagagcagacttcagagagcaggtggtaaaatatttcttatcagacttaaaagggtacctgactgttagttgattatctcttggatctggaaaggaaggaaggaaaacaaaggggaaaggggactcattatagaatgtggatttttcccacaagagactttgcagggcaatttcaaggtatggcaaggaaatatatttttgggtaaaacatttttattttcttccttgttatgccagagtcagattggaaagtcaagatatacagggttaaataaaacccacctgatgagaatttatgatttgtagggcatgactctctaggccccttagacaggaatttgggcaagatttaacaaatcagagctgagtcctcaaaatcctattattgtttcatgaatatggtttaagaatattaattacggagggcacggtggctcatgcctgtaatcccagcactttgagaggctgaggcacaagaatcgcttgaacctgggaggcagaggttacagtgagccaagatcatgctactgcactccagcctgggtgacagactgagactctgtctcaaaaaagaaaatgaaagaaaaggacaaagtaacaggaagaaaagaaaaccgtcatgtcaaagagctaatgcccttcatatatgaaaagttcttccaaattcgtaagaaaaatgttcaaaaatgatcacttcaatagaaaaataggcaaaggacatgagccaatttac

SEQ ID NO: 59162 - DNA, 481 bp, Homo Sapiens
  misc_feature (1)..(1): n is a, c, g, or t
  misc_feature (3)..(3): n is a, c, g, or t
  misc_feature (426)..(426): n is a, c, g, or t
  misc_feature (465)..(465): n is a, c, g, or t
nanattcggaacgaggggataaactttttaaagtactagactagattatcctgacaggtccatcctaactctgaggtccttttgatttgtagtcaactttgtgctctcctccattagtgatgttttctcaaataaatcagtatctgaacacttacttcccaagtataaatgacattcaaacaagtaatattcaaagagagcaaagcactcaagatatgaagtggaattccactggaataggcaaggaagtactgcctatataatctacttctgtagacttctagaatgttctaaaaaaggaaatgggaaaacaacatgggataatcttcagtctcatttttattagactttatgaagtctaaggaattttttatttatagggaattccaagttttagttaaactaacattaaagtaataaataccntcaaatatatactctctgataacccaaggagggctaacngtccattatgtgccgg

SEQ ID NO: 59163 - DNA, 1370 bp, Homo Sapiens
agggggcctcagggcccccccccagctatggacgaacggctactggggccgccccctccaggcgggggccgggggggcctgggattggtgagtggggagcctgggggccctggcgagcctcccggtggcggagaccccggtgggggtagcgggggggtcccgggaggccgagggaagcaagacatcggggacattctgcagcagataatgaccatcaccgaccagagcctggacgaggcccaggccaagaaacacgccctaaactgccaccgaatgaagcctgctctctttagcgtcctgtgtgaaatcaaggagaaaactggcctcagcattcggagctcccaggaggaggagccggtggacccacagctgatgcgcttggacaacatgcttctggcagagggtgtggctgggcccgagaaagggggcggctcagcagcagcagctgcagccgctgcagcctctggtggtggtgtgtcccctgacaactccatcgaacactcggactatcgcagcaaacttgcccagatccgtcacatataccactcggagctggagaagtatgagcaggcatgtaatgagttcacgacccatgtcatgaacctgctgagggagcagagccgcaccaggcccgtggcccccaaagagatggaacgcatggtgagcatcatccatcgaaagttcagcgccatccagatgcagctgaagcagagcacctgcgaggctgtgatgatcctgcgctcccgtttcctggatgccagacgaaagcgccgtaacttcagcaaacaggccactgaggtcctaaatgagtatttctactcccacctgagtaacccatatcctagtgaggaggccaaggaggagcttgccaagaagtgtggcatcaccgtgtctcaggtctccaactggtttggcaacaagaggattcgctataagaaaaacatcggaaagttccaagaggaggcaaacatctatgctgtcaagaccgccgtgtcagtcacccaggggggccacagccgcaccagctccccgacacccccttcctctgcaggtggatcccactgtcaccccggctgactgttttgcacacttcctgcttttgttcccacttcctatctaggcaggatcatagcagagagggggccttttggggtgagagggaccgagctgagataggctggagatgtcaggggacagaggccattccagtgatcttagttctgcctttcttcccacgggtggccaaggaacagcctgctctttctgtgtgttggaatgttattttgtggataattggagtatagtagcatgtccccacaaaaaaaaaaaaaaaaaaaaaaaaaaaaaaaaaaaaaaaaaaaaaaaaaaaa

SEQ ID NO: 59164 - DNA, 588 bp, Homo Sapiens
  misc_feature (81)..(81): n is a, c, g, or t
  misc_feature (147)..(147): n is a, c, g, or t
  misc_feature (155)..(155): n is a, c, g, or t
  misc_feature (158)..(158): n is a, c, g, or t
  misc_feature (202)..(202): n is a, c, g, or t
  misc_feature (213)..(213): n is a, c, g, or t
  misc_feature (249)..(249): n is a, c, g, or t
  misc_feature (308)..(308): n is a, c, g, or t
  misc_feature (310)..(310): n is a, c, g, or t
  misc_feature (340)..(340): n is a, c, g, or t
  misc_feature (344)..(344): n is a, c, g, or t
  misc_feature (352)..(352): n is a, c, g, or t
  misc_feature (400)..(400): n is a, c, g, or t
  misc_feature (415)..(415): n is a, c, g, or t
  misc_feature (429)..(429): n is a, c, g, or t
  misc_feature (438)..(438): n is a, c, g, or t
  misc_feature (503)..(503): n is a, c, g, or t
  misc_feature (515)..(515): n is a, c, g, or t
  misc_feature (518)..(518): n is a, c, g, or t
  misc_feature (549)..(549): n is a, c, g, or t
  misc_feature (567)..(567): n is a, c, g, or t
  misc_feature (580)..(580): n is a, c, g, or t
gttttttatttaaaataattttttaatcggctgatagttttaaaattatttaaaaacactatggggggggggatgacccancaatataaactgatatttattaatttaaaaagccaattaggcatgtcctgttatcccagtggaaanatataaantanctatgataatgaatgtgggctttgaattttaaaaaactttcaantcttggctatntcactagccaacaattctgtttcctcaactgcaaantaagaataataataatgatcctacaaggttgataaaaggatcaaatggaaaaaacagtntnttgtggataaaggtacaaataaaattatanatantctcttcnttccaaaaaggggggaaagtatttcttttcaaacttgccaagggggangaatgtaaatgctanctcattcttcctantaacaaatnaagtaatggtttcaaaggtactgctcagtccaaaacccaaattccccattaggatcccctttaancctaaatccccntantcctttttttaaaaaaaaattattaaacttnaacccccactttccaacntgaatcttaactntaaaaaaa

SEQ ID NO: 59165 - DNA, 556 bp, Homo Sapiens
  misc_feature (456)..(456): n is a, c, g, or t
  misc_feature (493)..(493): n is a, c, g, or t
  misc_feature (507)..(507): n is a, c, g, or t
  misc_feature (510)..(510): n is a, c, g, or t
  misc_feature (522)..(522): n is a, c, g, or t
caacaaacaaagttttctcgcttctgccacaatagtaaaaccatctgatcttgacaagataatggtgtcgttgactttgcttttttcttgtccgttggacaaaattggccaagaatataattggactgttatggccaataaaaacgaagtttaggtcaagtcttgtcaggatagcctgactaaaaacatctggctccttaatttaaaatagttcagacaaccagattcttgctgtgttttatgttaggttaacacgctgaactttaagaagctgtagactgcagtttgttgttatgagacctgctagctttgaagcctttcaatttctgtacaaagaatgattcgagaacttctgcacactggtaaaatggggagtcgcttggattgtagtaacgacagttatcaaaaattttggtcatatctgccacaaattccgtcagcttttcataatatcgnctttggactctttcttccatggtggcaaggtccatanggtccttaataccnccntaataatctggngcatcattaggggctactgggtcaaggaaaggcc

SEQ ID NO: 59166 - DNA, 1478 bp, Homo Sapiens
ttctgagcattttttaaaaagcttttacactcgctatctgctttttttttatttcttgtcatagtataaattttctgtcgaaaattgtttagaaatcagcttgactgagaacaggattacagtttaagttcccatatgtcttacttagtttcttcttaataataggtaatgtgtacagctcctcgttgtttttttgtttgtttgtttgagacagggttcttactccgtagcccaggctggagtgcagtggcacagtcacggctcactgcagcctcaaactcctaggctcaggtgatcctcctgcctcaggccttcccagtagctgggattacaggcacataccatcatgcctggctgatttttaaatttccttttctgtagatggggtctcactatgttgcccaggctggccttatactcttgggcttgagggatccacccaccctggcctcccaaagtcctggaattacaggcatgagtctccacactctgccttttcattgtttttaggtatatttatatacattctctcatcttatcctcaatagaaaaggggtctgcatatccttattttgcagataaaggatctgggctcagtgatgtgaaacatacttccacatgtcagtcagctattgagtggtagagactagactcagacctaaattttcttacctcaaagctgaagtttttcttcctattataattccactctctgttataactgactcttttctatttctgacccaaagcctaaaactcacatcaaaatatgctgtgaagaaaagtgataagttttcttaaaaatcattaaatgctacctcataaaataaatatatatatgaaacttgaagcatttatagatttctgttgttttcttgtagtgttaacctggatacaggtggttttgatacatcttttctgtttgaagtagcaggcttcccctgcagtgtaggtgatggccacctggtggcacatcacactaatgcatggagcttctcatttgtcttcaggattctgaaagtaaagccaatgtttggatgttatgggagctatgcatttcattgtattgtttcttgttaatagttttagaaaatactcttcacattatagttcagccatcaaaaaaaattcacccagaaatgaaggtactagtattctccatattgcagaaatcgtatttagaatttgctttaataagcagtgagttatagagaacaggattatgtagttagaaaagctaagaaaaatgggaaacgaaaagagttaaggttggacttaatggacatatggtatgggcatatatatgtatttttaaatagtattgctgctgttttaactattttaataaatatattacaaaatttatggcaatttttaaatctttagaattattacctgcgaatatctcttaatgaatttcgttagcttctctttgaaaatggctttttgtggtttttcttaaaaaaaaaaaaaaaaaa

SEQ ID NO: 59167 - DNA, 579 bp, Homo Sapiens
  misc_feature (486)..(486): n is a, c, g, or t
  misc_feature (511)..(511): n is a, c, g, or t
  misc_feature (536)..(536): n is a, c, g, or t
  misc_feature (551)..(551): n is a, c, g, or t
  misc_feature (559)..(559): n is a, c, g, or t
  misc_feature (566)..(566): n is a, c, g, or t
  misc_feature (574)..(574): n is a, c, g, or t
ccagagacaggacctcaccctgcagcccaggctggagtgcagtggcgtgattatagctcactgcagcctccaactcattggctcaagcgatcccccagtcttagcctttcgagtagctgggactactggcacatgccaccatgctcagctaatttttaaattttttttgtagagacggggtctcgttatgttgcccaaggtggtctcaaactcctggcctcaagcgatcctcctgcctcagcctcccaaagcgttgagattagaggcttgagccaccatgcccagcctattcactctttctttagaaatgtgaagtgacccctgaaaaacctggaggaagaaggaaaaggaaggatcctggataattatctaccctgtgggaagccattttaactatactgcattaagacattcattgcttctggcactttcttactggctcctaactttggttcatgtttccaaaggcatttaataattcttttnctaatttcaaaggctgtggggtttnaagaataaattatcaagcctactgncacaccaccaacctnggacttancaatggnccctgaangttgg

SEQ ID NO: 59168 - DNA, 1887 bp, Homo Sapiens
tggataaagaaaatgtggtacataaacaccatggaatactacacagccataaaaaagaatgaaatcatgtcctttgcagcaacatggatgctactggaggccactatcctaagcaaattaatacagaaatggaaaaccaaataccacgttctcacttataagggaaagtgaaacactgggtatacacggacacaaagatggaaacaataaactctgggaattccaaaaggggagagatagggggtgagggttgaaaaactacctattgggtactatgttcactgcttaggtgacaggatcattagaagcctaaacctcagtatcacacaacatacccatgtaacaaacctgtacatgtacccctgaatctaaaataaattttttcaataaagaaagaaaggttcttggaggagatagattcgatgttaaatcttctttcatcagcacatgtgtattgactgtcactctctaccaggctgtattctaggtaatggatgtaggagagaacaaaaaggtctctgctgttctgaagcttatagtctattggggagagatagtaaataagacggaaacaaataaatacacagtttcagagagcaatgagttctacaaatgagcagtgagccctataaacaaaatttagattaaattaaattaggataggtcagcctctttgttatagcagatgatactttttatatggtttagcaaagagtcaggaggaagtaattttaaaaagaaaacaaaaaaacctcttaccaccactttaagccactgtggtgattgagcaaacacaaagggaaagtcaaacctctgtcatttgcctggactatctggatgtgatgtaaactgggaaggtgaactttatgaaatctatgcaactaagatcagaggctgagctatgcccctcaaggagtgatatcttacaattttatcttaaacatgggtcatattgatcatttatgtcttaatttagtgatataaaattagagcctgaaagagtacctaaaaacaattgtccacacacaggacagttctgaaagaaatttatataacactattatatgcagtgtttttcaagttttcatttattaaaatcaccaaattaagtcatcctttcatacgctgtgattcagttaaaaggggcttttgttgcagaagctctagttaaggtttgaaaatcgatttctctacttctgcttccaagaggatggagtaggcatactttgccctattcttcccactaagtacacctaaaatccctagacatacataaaacaaatgtaagaacattctggaaggtaaagagaagaagacggactgattagggtccttgagacttgaggggcgccatagtgatgagctccaggggactttctttttgcctcatgtatccagacttggagccgaagtcgctgggaacccagaaacagtaatcggcacagactttagaaaaacaacaataaaagctgactttctctaaccaaataaccaggaaagggacagcccagcaagacacaaaagttttagaccataaatgtgctactgcagctgaacaccacaggaaacactgtggtcccccctcacccacaccagcaagggctgagtcaagtgagacttctccccttgctggggtggtgtcagagaagaccaagccaggagccagaaatttcatccccactggtcagtaaggaagctcgtccgctcccagagtttcagtggagaccacgtgggaattctggattctcacccccactcagcagtaaggaggcacctacccctcccccactccctggccagttgacacccagtagaaaacccagatgcctgcattcacctggcggtaacaagatggtggcagccaccttcccctgctagagcagtgtc

SEQ ID NO: 59169 - DNA, 2201 bp, Homo Sapiens
tttatactaggccttgaaagatgcctgggatttctttagacagaagaggcagagaaatgtatttctggaaaaagttacaggagtgagaaaggacatatttaggaaatgacaagtgcttcagtttggctgcaatataaggtgtgtgcgaggtatgtagggaatgttaggaaataaggttgatatataggttggggtcagaatagaactttgaatatgccatgcaacaagggttgaatttacatgatagttgatcttgaagactgaaaactaggaaattacccagtcagaactgtgctttagaaggatgtgctgggggactgggcatggtggtttacacctgtaatctcagcacttcgggaagccaaggtgggaaaattgaggccaagagtttaagaaaaatgtactggaaagccatgagtaaaatagattagaatgaaggatagagggtacagagaaattggaattcagaaattctattggaattacctataaaaaacaaaggtagagccactttaaacatgtgcagtttatatatgccagtaatacctaagtaaggccgtttaaagaaaaaaaagtaagctatgataacgaggcactgaacttggaaagatgaaagaaagttcagatttgaatgacattttggaaatagaatctacagaggaggatggaaagagtgaagaagtaggagtggagtcaaacatgatgaaatttttaagcttgggtaatttaggaaaattgtggagccagaatagaaatagagaagtcaagaggaaggaggaaaaagcattttgatgaattgatgaatctcttggacacattgtaactgaagtgtccacaaggtatcagtgattttgtcccagaggcaggtgaaaatgtggaatggtggtgcatggcgtagatcaccttctcagttgatgctgtacaagctgaagcaatggatatgaatggaacaaattgctcagcagtttcttataactctaactttctgtgacctgagttcaactatctctagtatacctgaataatatataagttggtattgtggcctaatatggggggaggtaatttctgatttttacattggttttatttctaaggtatttgtatacatagactctaacagaacacaaattcagaaacagatagttttgtatttgttcaggcgaaaatgacagacatcctctcttagctgtaggggaagaaactttgaggaaaagaagcgtctgacggtttctgaaaaccaagctaaaagggacaaaaatagaatgagatccttttctatggcattctttctctgtggttttaggaaatggtcttaataatttcttttaattctgtaattcttttttgtttgtttgttttaattcaggaccacaaataggaaaatctgccatttgcatttttgtttaatcagctctctcattagcacattctaatgtaaatgttccctgatttattgactgaagtttagtggattctccatgtatgtttggttatgcatagactggttgctgttaattgcacttgaattttgggatttttattttatcaataatagagcttctctaggcatgagtgatgttccagatatatagttgtcttaaaaatgtgattgaggaagggtacggtggctcacgcctgtaatcccagcacttcgggaggctgagacaggtggatcacttgaggtcaggacttcgataccagcctggccaacattacagaaccctttctccactaaaaatacaaaaatcagctgggcatggtggtgggcacgtgtaaccccagctactcgggaggctgagacacgaaaataacttgaacctgggaagttttagttcaagaccacaaaccaacaaaaacccacaaaaaacctgctttgccttctttaagaaggaaaaagggccgggtgcggtggcccatgcctgtagtccctggcaatttgggaggccgaggagggcagatcacctgaggtcaggagtttgagaccagcctggccggcagggtgaagccccgtctctactaaaaaaatgcaaaattagtcaggcgtggtgatacatgcctgtagtctcagctgctcggggagctgacgcaggagaattgcttgaatccgggaggcagagctgcagtgagccaagatagctccattgcactccagcctgggcaacaagagtgaaactccatctgaaaaaaaaaaaaaaaaa

SEQ ID NO: 59170 - DNA, 603 bp, Homo Sapiens
tttttttttttttttttaacttctaaaactcagtcattagtgatcctaccaaaaaagttttaaaataaatgtgtatactttttggacaaatgtgtaaattaggtataaagatgaatgagaatttacagaattgaaaataaataataacagagagaaatgaagaattattctgccaatactatgatttgaattattagcaaggcaaaaaacatactattcagatccctaaaaaccatatgaagcttctttttaaagtgctcaaacgtcttaatggatttgagttttaaaaccagatcttaatttttttattacaaaaattatacacataaattataaaatgatcaaatacaagacagtttttcaatcccacgaactgaagcagaaccattaacaatttgatgtttctttctaggcatttttgtgaatataaatgtatatgtattattttttaagacatgcttttggaaaattgctttaatattatatcatggaaatcttttcaactctagggactgtcagacatttaagctgtagaaaatttttctgtaacaaaaaaaaaatgctataatgaacatccttgtacaccaaaaaaagcatgatttt

SEQ ID NO: 59171 - DNA, 496 bp, Homo Sapiens
  misc_feature (377)..(377): n is a, c, g, or t
  misc_feature (431)..(431): n is a, c, g, or t
  misc_feature (436)..(436): n is a, c, g, or t
  misc_feature (461)..(461): n is a, c, g, or t
  misc_feature (467)..(467): n is a, c, g, or t
  misc_feature (473)..(473): n is a, c, g, or t
  misc_feature (487)..(487): n is a, c, g, or t
  misc_feature (495)..(495): n is a, c, g, or t
gcaattttacagtaagtcataccattccaaactaaaaagcttttgtgaaaaatcagtacacgaatacaccggagtgtaatgtaactaagagaccaccagaccaagaaagcaaggcatcctcccaggagaatgagggtgccctggctggtctgccctcactccaacccgcagacctgcggagcatccagggggccgatactcaggtgggctacccttggccccctgcccagggctccctcaggcaggctgcggccagcccctgcggcaggaccacatcctgtcccattcccctctccagcactacccactatgattaagctctcaaaccgagtacaccatggtgtgtccacgggtgagtctacaggagggcagatganggcagggctgtctggctaaccaagtgtcacttagggaacacctgtcggatggangcgtnaggtgtcagatgctgagcccatcgntggtcnaactgngcaaggtggggaanggtctggnt

SEQ ID NO: 59172 - DNA, 1476 bp, Homo Sapiens; identical to SEQ ID NO: 22794

SEQ ID NO: 59173 - DNA, 2481 bp, Homo Sapiens
cgaacttggggggagtgcacagaagaacttcgggagcgcacgcgggaccagggaccaggctgagactcggggcgccagtccgggcaggggcagcgggagccggccggagatgccctgtatccaagcccaatatgggacaccagcaccgagtccgggaccccgtgaccacctggcaagcgaccccctgacccctgagttcatcaagcccaccatggacctggccagccccgaggcagcccccgctgcccccactgccctgcccagcttcagcaccttcatggacggctacacaggagagtttgacaccttcctctaccagctgccaggaacagtccagccatgctcctcagcctcctcctcggcctcctccacatcctcgtcctcagccacctcccctgcctctgcttccttcaagttcgaggacttccaggtgtacggctgctaccccggccccctgagcggcccagtggatgaggccctgtcctccagtggctctgactactatggcagcccctgctcggccccgtcgccctccacgcccagcttccagccgccccagctctctccctgggatggctccttcggccacttctcgcccagccagacttacgaaggcctgcgggcatggacagagcagctgcccaaagcctctgggcccccacagcctccagccttcttttccttcagtcctcccaccggccccagccccagcctggcccagagccccctgaagttgttcccctcacaggccacccaccagctgggggagggagagagctattccatgcctacggccttcccaggtttggcacccacttctccacaccttgagggctcggggatactggatacacccgtgacctcaaccaaggcccggagcggggccccaggtggaagtgaaggccgctgtgctgtgtgtggggacaacgcttcatgccagcattatggtgtccgcacatgtgagggctgcaagggcttcttcaagcgcacagtgcagaaaaacgccaagtacatctgcctggctaacaaggactgccctgtggacaagaggcggcgaaaccgctgccagttctgccgcttccagaagtgcctggcggtgggcatggtgaaggaagttgtccgaacagacagcctgaaggggcggcggggccggctaccttcaaaacccaagcagcccccagatgcctcccctgccaatctcctcacttccctggtccgtgcacacctggactcagggcccagcactgccaaactggactactccaagttccaggagctggtgctgccccactttgggaaggaagatgctggggatgtacagcagttctacgacctgctctccggttctctggaggtcatccgcaagtgggcggagaagatccctggctttgctgagctgtcaccggctgaccaggacctgttgctggagtcggccttcctggagctcttcatcctccgcctggcgtacaggtctaagccaggcgagggcaagctcatcttctgctcaggcctggtgctacaccggctgcagtgtgcccgtggcttcggggactggattgacagtatcctggccttctcaaggtccctgcacagcttgcttgtcgatgtccctgccttcgcctgcctctctgcccttgtcctcatcaccgaccggcatgggctgcaggagccgcggcgggtggaggagctgcagaaccgcatcgccagctgcctgaaggagcacgtggcagctgtggcgggcgagccccagccagccagctgcctgtcacgtctgttgggcaaactgcccgagctgcggaccctgtgcacccagggcctgcagcgcatcttctacctcaagctggaggacttggtgccccctccacccatcattgacaagatcttcatggacacgctgcccttctgacccctgcctgcctgggaacacgtgtgcacatgcgcactctctcatatgccaccccatgtgcctttagtccacggaccccagagcacccccaagcctgggcttagctgcagaacagagggacctgctcacctgcccaaaggggatgaagggagggaggctcaaggcccttgggggagggggatgccttcatgggggtgacccacgatgtgttcttatcccccccgcctggccaccggcctttatgttttttgtaagataaaccgtttttaacacatagcgccgtgctgtaaataagcccagtactgctgtaaatacaggaagaaagagcttgaggtgggagcgggctgggaggaagggatgggccccggccttcctgggcagcctttccagcctcctgctgggctctctcttcctaccctccttccacatgtacatgtacataaactgtcactctaggaagaagacaaatgacagattctgaccatttatatttgtgtattttccaggatttatagtatgtgacttttctgattaatatatttaatatattgaataaaaaatagacatgtagttgg

SEQ ID NO: 59174 - DNA, 557 bp, Homo Sapiens
  misc_feature (411)..(411): n is a, c, g, or t
  misc_feature (423)..(423): n is a, c, g, or t
  misc_feature (429)..(429): n is a, c, g, or t
  misc_feature (462)..(462): n is a, c, g, or t
  misc_feature (478)..(478): n is a, c, g, or t
  misc_feature (481)..(481): n is a, c, g, or t
  misc_feature (517)..(517): n is a, c, g, or t
  misc_feature (550)..(550): n is a, c, g, or t
aggtaaaaagatgtatttcaaagtgggatcagtgaatcttcaactaaataaataaatgtacagccccccaagatgcagaatttcccatccctagcttaacagtcacggttcactttgttttacgtgcgtttcgcagatgagtggtgctctcatcagcagacacaagacttctttggcctctgcttttttttcctttcttctaataaggagactacactctagataaacaaaacagacaggcgaatgtaatccagggttttggtggtttttctgagtctagaaggactaaaaattagccttgataggcagaaagagcatcccaacctgtctgtcaaaaactctggccatttctaggacacctttgccgaactgaaacaggaaacaacaaaaattttacatgcttataaatgntttctccccctncgaggnaaatctttcataaagatggactcattacctcantttttacacttgcatntgncccttttcaaaaagtaccggactactcttcatgatnttaacccagccccctaaggggcgttttccattntggcctt

SEQ ID NO: 59175 - DNA, 3081 bp, Homo Sapiens
cccgccagcccagcccagcccaaccctactccctccccacgccagggcagcagccgttgctcagagagaaggtggaggaagaaatccagaccctagcacgcgcgcaccatcatggaccattatgattctcagcaaaccaacgattacatgcagccagaagaggactgggaccgggacctgctcctggacccggcctgggagaagcagcagagaaagacattcacggcatggtgtaactcccacctccggaaggcggggacacagatcgagaacatcgaagaggacttccgggatggcctgaagctcatgctgctgctggaggtcatctcaggtgaacgcttggccaagccagagcgaggcaagatgagagtgcacaagatctccaacgtcaacaaggccctggatttcatagccagcaaaggcgtcaaactggtgtccatcggagccgaagaaatcgtggatgggaatgtgaagatgaccctgggcatgatctggaccatcatcctgcgctttgccatccaggacatctccgtggaagagacttcagccaaggaagggctgctcctgtggtgtcagagaaagacagccccttacaaaaatgtcaacatccagaacttccacataagctggaaggatggcctcggcttctgtgctttgatccaccgacaccggcccgagctgattgactacgggaagctgcggaaggatgatccactcacaaatctgaatacggcttttgacgtggcagagaagtacctggacatccccaagatgctggatgccgaagacatcgttggaactgcccgaccggatgagaaagccatcatgacttacgtgtctagcttctaccacgccttctctggagcccagaaggcggagacagcagccaatcgcatctgcaaggtgttggccgtcaaccaggagaacgagcagcttatggaagactacgagaagctggccagtgatctgttggagtggatccgccgcacaatcccgtggctggagaaccgggtgcccgagaacaccatgcatgccatgcaacagaagctggaggacttccgggactaccggcgcctgcacaagccgcccaaggtgcaggagaagtgccagctggagatcaacttcaacacgctgcagaccaagctgcggctcagcaaccggcctgccttcatgccctctgagggcaggatggtctcggacatcaacaatgcctggggctgcctggagcaggtggagaagggctatgaggagtggttgctgaatgagatccggaggctggagcgactggaccacctggcagagaagttccggcagaaggcctccatccacgaggcctggactgacggcaaagaggccatgctgcgacagaaggactatgagaccgccaccctctcggagatcaaggccttgctcaagaagcatgaggccttcgagagtgacctggctgcccaccaggaccgtgtggagcagattgccgccatcgcacaggagctcaatgagctggactattatgactcacccagtgtcaacgcccgttgccaaaagatctgtgaccagtgggacaatctgggggccctaactcagaagcgaagggaagctctggagcggaccgagaaactgctggagaccattgaccagctgtacttggagtatgccaagcgggctgcacccttcaacaactggatggagggggccatggaggacctgcaggacaccttcattgtgcacaccattgaggagatccagggactgaccacagcccatgagcagttcaaggccaccctccctgatgccgacaaggagcgcctggccatcctgggcatccacaatgaggtgtccaagattgtccagacctaccacgtcaatatggcgggcaccaacccctacacaaccatcacgcctcaggagatcaatggcaaatgggaccacgtgcggcagctggtgcctcggagggaccaagctctgacggaggagcatgcccgacagcagcacaatgagaggctacgcaagcagtttggagcccaggccaatgtcatcgggccctggatccagaccaagatggaggagatcgggaggatctccattgagatgcatgggaccctggaggaccagctcagccacctgcggcagtatgagaagagcatcgtcaactacaagccaaagattgatcagctggagggcgaccaccagctcatccaggaggcgctcatcttcgacaacaagcacaccaactacaccatggagcacatccgtgtgggctgggagcagctgctcaccaccatcgccaggaccatcaatgaggtagagaaccagatcctgacccgggatgccaagggcatcagccaggagcagatgaatgagttccgggcctccttcaaccactttgaccgggatcactccggcacactgggtcccgaggagttcaaagcctgcctcatcagcttgggttatgatattggcaacgacccccagggagaagcagaatttgcccgcatcatgagcattgtggaccccaaccgcctgggggtagtgacattccaggccttcattgacttcatgtcccgcgagacagccgacacagatacagcagaccaagtcatggcttccttcaagatcctggctggggacaagaactacattaccatggacgagctgcgccgcgagctgccacccgaccaggctgagtactgcatcgcgcggatggccccctacaccggccccgactccgtgccaggtgctctggactacatgtccttctccacggcgctgtacggcgagagtgacctctaatccaccccgcccggccgccctcgtcttgtgcgccgtgcccacagatgtgaaatgaatgtaatctaatagaagcctaatcagcccaccatgttctccactgaaaaatcctctttctttggggtttttctttctttcttttttgattttgcactggacggtgacgtcagcctgtacaggctcccaggggtggcgtcaaatgctattgaaattgcgctgaatcgtatgctttttccttttgataaataaacaatgtaaaaatgtttcaaaaacctaataaaataaataaatacg

SEQ ID NO: 59176 - DNA, 558 bp, Homo Sapiens
  misc_feature (381)..(381): n is a, c, g, or t
  misc_feature (468)..(468): n is a, c, g, or t
  misc_feature (482)..(482): n is a, c, g, or t
  misc_feature (511)..(511): n is a, c, g, or t
ggaaatccaaaatacaactcatccactgaaatacctggcttagtgtcaaatgttttattctgcaatggtggcttaattcagatgggttggttacatgctacctgctattaagatggcctcatgcaaactgtcattctttgaaactgctggtatgtggagattgcacaacttcatgtacaaatgaacatggaaccagagaaaccacttagcagttacactggtacaacaacaccatacaaatgaattacaaagcagccctcaagagatgttacacacgtgataacaagtagtcactgctggcctgtcattttagcaatttatagtttgcttgatatatgtgtctgtgtgtatgaatctaaagaatgagaaaaaattaattgngtagtgattcatttatcaggagtcagacttaataaaatggaacaaaaacatcacaaacaggtaaagcatggagaatctggtggggtnaagggccttggaantgccaaaggaaaatggatggtactatccntttggggggtcaatcacttatttgaaagggctggaaaaagacaagta

SEQ ID NO: 59177 - DNA, 1685 bp, Homo Sapiens
ctggcgtgatactggtgccctccataggccagcttgaaactgtctgtttctgagttgaatgcccggctcctcgagtccacattcaagaggcacactccacaggcaagctcctgagcatttttaatcccaggccgtaacatacaggaggaaaaatccagcgagttttcatctggtgtgagtgtggcgagtgacatgaagccgattaggttattccatactttatcgatgtccttcagcaactgctggagtttctcactgcacactgcagtggcttttatccccagctccacacgcttggttaccctgtacacttcaacaacacctgacgggatgagagagcagagagagagtgttggcagtggagacacagaggacccagacaggggagcattattgcttgctgatatctgtgagaaacaatgggtgtatctggacagaggtgtacttactattctttgggaccaatccacttctcaatgctgctgtatagcttactggtaagagcatagaagctgcactgcttgggttcaaaccccagctatgcctcttactggctacatgaccttaggcaagtcacataatctctctgtacctcagtttcctcatctgtgaagttgggatggtaacagtagctcctccaaggatggttgagaggattaaatagggtaatatggtaaaaggcttacaacagtgcttggagaatggcaggcactatgcaagttattagcttttgttttttgggaggtttatttatgagtccatctgtttgaatctgggaaatcccaataaactagctgaaaatggggatagtaaaaatttaaaagaatctaaatgttaatagcatcacaaagtaatgaagaaacatctcacccctctgaatctgaaggtcttacaaacactttgacttcacttatctttaaacacataacaggatgcagaacagttcttttcctatggtctctaaattgtggttgaactcttgaagcaaggatgagaggtgctaagtacctccacattctaaggacagccaccagacacatccctaacccctgcaatgtaacagtcaccaaagacatgaccccgatctctctaagtgaacactggaggaattccaggggatcttcagagcggggcctcagcagccctgtgtcagcactacggcttttcttcttcctttcccaagagaggggcagaaattactgcccaccctaagccaagtgagggggcttctaagagaatcttccatagatacaaggatactaggagaaaagacaggtgccccatttcctggtggacatctgcttatgcagaactgtgcctgtttgagcaggaaaagaagaccccaagtgaggtggcaggagtaaggcagagactacatcccttcactctccactcatccagcaaatatttttgagtgccaactacgtgcaagacactagattaggtgttggggacacaccagtgaacaaaacagaccaaaatccttgccttcttggaggttcattctagtgaagggagacagagagtaaaaacaacaagtagctaggtgcagtggctcacgcctgtgatcccagcacttcgggaggccaaggtgggtgggtcgcttgagctcaggagttcgagaccagcctgggcaacatggcggaaacctgtctctacaaaaactacaaaaaaaaaaaaaaaaa

SEQ ID NO: 59178 - DNA, 2518 bp, Homo Sapiens
aagctacactgcagtcatatttggcatatgtgacatataggcccactgcatttccttccaaaggcaagatgccaagggaaggtgccagtaattttatgaccaatatgacaccattttgtggtgtttgtaagttgaaacaatatatttccctgcattacacaagtttataaaaaacaaacaaaaaaaagaggccccagctgtggttgatcgatgatgaattgaatagagcctaaccttccaggcttctcacttgcacaggcccttccaaggtcctgggagggcccctggaaatttttgtagtcataatttttttaatgtttttactagataaggctcaggccccacaaaatcctgaaatcatccctgggttccaatagttacaacccagtaaatctcttgaatgaagcctctatgttattgacaaatactgactggccaagttagcagggtgatagggtcagtctattttgaatctgaaatccatctcaaagacaggccaagagcttattagtggacttaactggattctgctggcccaagcgcagtaaagtcaaacaaccatatcgaggttttgcactggggaaaggaggacatttatttgcagggcatccaagcaagaaggaccaggcggctaactatcaaagtccctcactgaatgggggcaataatcatatctcttacagatgaaatcatgaatgaaatggtttatggaaaagcagcaatggttgataatcctaaatgttaagtatgtttatattttttccctgactttaaagtgcttctccttcattcctatacacaggtccagactgatggcttattttttaaaattctcttagtcacttcattggttctaacaataattttagaaactggatgactttgcaatgtagaaaggctatactttattcagatagagtacactcacatattggcttgtctatggcacatcgatatcatgccaagaatgtaagcactaagagagaataagaggaaaatccaggctttatccctattgaattatttatcccactattagaatattagtgaggtaggtgtggccacactgtgatggcaaattgagcttcggtcacaaacatgccttactgttccccccagtctactgacatcagcttcctttacatagcggtagatgcacaaaagtttgcacagttgagggtattgtcatcatgttttggtatgtactggaatcctggcagcttcttctctgattcggagaggcgcaaacattaaagacaaaaagaacaactcgagtctgtcctttggggtgatttagggtggctgtttaaatttgtagtggttgaaaagtcttgagattgtcacacctagcaactcttatacttttcttctctcagctgcagcttgttcttttcacctgtgtaacaagctgtcttctcttctcacagaagcttagcatttcttcctctgccccatagcattttttcaatacttaatttaccaggtgctgtttatgttgtaggcacctaagtacttatacaagtgagataacatgtccgaagttcttagaacagtgcttggcctatggtaaatgctccatacatgttacctcctatgatacctcattttcatttttccaacaactcttgcgatgcggttattattatcatttctattttgtagatgaggaagttgaaactcagagatgctaggtaatttgctaaggttcacatggctaataagtggcagaaccacttacaagctttgcaaataattttcaatgcagctcttagttcccctgtaataggagctgaatgatgacaatttggctttgtgtgcattgtatcttactttctaacttgaagaggacctgtagagcagtgagctccacttccctctgagaatcccacgcttctggagctcctggctgtaccagctctgggcatccccagggtttatgctcaccggtcagtgctggtgtgacatgatggctgagcaccggcactgtgtccagcgcattgctaggcactagacacgtgctctttcatttattcctcaaattgctttgtgctgtaaacgctacccagaaaggctcatgttcattactcaagtcacttcaccagaaagtgacagagccagaattcgaacccaggtctgccagattccaggtcccttgcttcttctgttgttgctcattgcaagggagtcttcttcaaggttattctcaggactttgattaagatacaggctcacagctgggcatggtgtctcatgctgtaatctcagcactttgggaggccaaggtgggtggatcacttgagctcagaagttcgagaccagcctggccaacatggtgaaaccctgtctctactaaaaatacaaaaattaaccaggcatggggacgggcatctatgatcccagctactctgaaggctgaggcaggagaatcacttgactccaggaggtggagtttgcagtgagccaagatcacaccactgcactgcactccagcctgggcaacagagtgagacttcatctc

SEQ ID NO: 59179 - DNA, 554 bp, Homo Sapiens
  misc_feature (550)..(550): n is a, c, g, or t
gttgttgttgtttgtttgtttgttttttacactgaggcatggtctctctgtgttacccaggctggagtacagtggctattctcagttacaatcacagctcactgtagccttaaactcttagctcaagcaatcctcctgccttagcctcctgagtagctgggactataggcatgtgccactatactcagcttagactgctatttttaatcttaaattggctgttatataagcaggtcttaccttatatacaaacttcttaaaggctgagctattttacaatagctaaatacaatagcaccaagttgagtcctaagcatataaaagaacatggatattttttgaatggatctgaattttacatatatataataattgtgtcatttactattttaaaaacattatgtgattacattttcagcatataagctaatgacattaatctaggcataacatctaacaaagaaatggtaagcagtggcaacataaacacaatttatatcctaattcataggactttatttttattcctgaaaaaccattaaacattggncaaa

SEQ ID NO: 59180 - DNA, 2440 bp, Homo Sapiens
ggccttttttttttttttttttgagatggagtttcactcttgttgcccaggctggagtgcaatggcacaatctcggctcaccacaacctccgcctcccaggttcaagcgattctcctgcctcagcctcccgagtagctgggattacaggcaggcgccactacgcccggctcattttgtatttttagtagagacggggtttctccatgttggtcagggtggtctcgaactcccgacctcaggtgatccggccacctcgatctcccaaagtgttgggattataggcgtaagccaccgcacccggtccaagaaccagtgttaataaacgtacagtagaagtggggtgggggcagggggaagctactgatcacaaacgagaaactaccacacacaaattaattttacagctttgatttagtctctcgggaccccacatctgaagaggggttaggcagcgaagtgtttcggtatggggcttgaggatagtgattttgggattctgagctactgagctcctctgagactctggggcactgctcacttgtaagcacaagggggctttgcttgacggtaatttaggtcaagcttccttgaatttcgatgaggcagctggagtttcttgaaaatattctcagctagattcagaataattctttctcctcttcgcttttgtggggactttatctcaagtgtctgtttctgtctcactggaagacttaatttaggggtccttcagacccctaaattcagttgaggaaatgacttctgctgcaaatagagacctctgctttatttgtcatggagaacaaggaactcaaatgagagatccaaggcatccttgttttcatgcaaatggttctatcagctcaacagaaggaaatgaaaaaaaacataggggccaaaaaaacagagaagaattatctctgcacacagagtatcagctgatctttaacaatgtcttctaagagctccattctaaacattatcagttttccaaatgtaagcgcatgtgagctgagctagctatgggatatcgcacacttcaaatcccttataaaagtcatgagaaggctgtactccctatgtctcaccagcagacaggccaaatctctgaatttgatgtcctgctgtgaacagccatgaagaacactcttggtttttgtagggaggatttctattttcaattatgggctttttttgggggaagtggggaaagtactgtatccttagatgaccacggttgctgtggccaagtctcaaacacttgtttcagcagctggaacactaaataaatttagtctttgtcttctgggtctttggtaaagagctagttagaatttattcaagacatgagagatatgcctggcacaaagtcagacagtatatattatgggtttctgttgtcccccttgagataaaattacagaagggggtggagggaaatgagggggtctcttggcccccaggactctggtgtcattttctcctataaaccattttcaggactctcaatgacctagaggctctctgaacaggcataggctgtgcctgtctagataggtccccactgctatattggtaaccacactcaggagatgtgaaatctttcagtcactttttccattattgtattcagtctggaggcttctcacagtcctctgtagggtgcagaaagagaatctctgctctctgtcagactgctaccctgatggggaatgccattacccacagggaagcagcaacacagcattcttacactacagacctgcagcttgatatgtgagtgatttaaaaacatacattttagtacaatgtatggaatggtaagaaaacactggtgggttagacctttggcttacatgcactattactgtgtggccactggttatctttgaggatagctgttcatgccaaagcgttattttaacttttctctattactttatgatctatgaggccatttggggtctctctaagaacacagctcccatttataacactatttcaatagagaataagctctgaaaaaacactgttttgaataaagctcacatttcccagaaaatagccctagtgtgattcaaataggcatggcattgtgtagcgagaagccatgaaacctgtgggagcacgagctgagcacacagggagaaccctgcatttggattcactggcaaagaccaaacttgaagctatagctctgggtacctctcaattatccctactggctgaggcaacactttaatggtagcctgaggcgccagccctgtgagacatttgacaactcacagcacaacaaccctcctatgagcgggattcctcgtctgggcgcagtggctcaagcctgtagtcccagcaccttgaggggtcaaggtgggaggatcagttgagtacaggaattcaagaccagcctgggcaacatagcaagacctcatctctacc

SEQ ID NO: 59181 - DNA, 567 bp, Homo Sapiens
  misc_feature (445)..(445): n is a, c, g, or t
  misc_feature (488)..(488): n is a, c, g, or t
  misc_feature (500)..(500): n is a, c, g, or t
  misc_feature (524)..(524): n is a, c, g, or t
  misc_feature (529)..(529): n is a, c, g, or t
gttttattccttctgaaccacatactttgttctttttgtttattactcatatacttaaagagcagtggtgaaaaaggcccttagaaataatttcatctactgccctcaggaaatctgaagcagatctgcaggcatatcttatctttggtttgtagcttctaccctccttacaatcccatacatttaaaattccaatgtataagtcttgctggcttcattacaatccacctcagaataattagacacagagcaaattgtgggataatccaaccttagttatattttcttctcagtccatgagacaaaaaaggattcaaacaaaataaatacatgcttgacaaaaatgggacaaaagaagaaacaaatgaaaggaataatgaacctataaattttcaaaatctataaacattgaactaagacttgatgtacttgatatacctgctgncctaaaattgactttcatttctcacaattaatcgcctttctgnttcgacaaggtnctaaaatctacacaatttttcagnactgngtaaacctatccctactaaaagaaattttcctcgaaga

SEQ ID NO: 59182 - DNA, 1847 bp, Homo Sapiens
ggcctttttttttttttttttttttttacggagattaggtcttgttatgttgcccaggctggtctcaaactcctgggcgcaataaatccttccacatcagccttccaaagtgttgggattacatgctgcacccccagtgtatcagcacttcttaaattaaaataatcttgccaactaatgtcttgttttacatccttcccctttagtctactacttgccattctatccttagtagcctcgatgacggctccccttttaccccatacctctctcccccaaaaaagcttggacagcaaccaaattggcttgtatcagtattgtcaactggaggcctacatgaggactcagcttactgtttttcttctggttaattgtggacataatcaagttcattgcttttactccccatctgctaccactcttgtgcagctatttatggtgatggctttgttacgtatatacacatagaccattgttaatcccctccttttcctttggctgccaaacagtattcatttgaacatcatcagaaggtgtgcaagcactttgggaggccgaggcgggtggatcacgaggtccagagattgagaccatcctggccaacatggtgaaaccccgtctacactgaaaatacaaaaattagctgggcatggtggctcgtgcctgtggtcccggctacttgggaggctgaggcaggagaatagcttgaaccagggagtcagaggttgcagtgagccgagatcgcgccattgcactccagcttggcaacagagcgagactccatctttaaaaaaaaaaaaaaaaaaaaaaccagcttgcaagctaagtagttatcacatgccaatttacatgatttttcttaaagtcatgagcatattgctgacagaagttacagaaagtacttgccttttgaggttaatctgagtcttccttaatttacaggaggaggatatgtaaaacattctaagcttaggtaaccaaataaacagctttttaaatctagatgaatatccagcaggatgacacgtttttgttgttctatactgtcttccacattgtcatcttacaacctgttttccatccactgaatgctgtttgctccctagatcactgtgtaaacccagttgaccccaccttcatttgtatagccactgaagagcatttgcaaaaatgcgtgtaaatgtagtagagaatatgtttgttagatttattattactgtcatattgcatgagacttaagagtttgattcagttcagagggaggttccatcttcgtgcaagtacaaagatcatttaaaaggctaaatgctgcctcttcaaaaaggtcacaagaaaggctctatgtgcttgatgagtgtaaatgcagtgtttttaaatttaccctgagagactatttttgtacttgtgatgagagaaaatttggaggaagatgtgacattagaattggtcctttaaacatagacttcagatagacctaagggaagaacattctagttgagaacaaagccattgaaatgttaatacgcaagttgggggaatctttgagttagactggttgggctagtaaagtatgatggagtgccaggatttcaggaatgtgttgagagataagaatggaaaagtagtacaactggtttactgaggaatcttaaatctgggtataaacgtgaaatggttttattttttccttactgggtctccagtcatacagtgtaaaacactcctaacctctgtactttcctctgcagtgcagtcctttaagaatcccttggtccgatgtaactttgccgccacttttggttactacaaaaaacttattccagaaattaagacaggttctagccatt

SEQ ID NO: 59183 - DNA, 2377 bp, Homo Sapiens
attaaaaaggaagctcaaggccaggcgcggtggctcacgcctgtaatcccaacactttgggaggccgaggccgacgtatcacgagattaggaggtcgagaccagcctggccaacatggtgaaaccctgtctttactaaaaatacaaaaactagccgggcgtggcggcgcgcgcctgtaacccatgctactcggaaggctgaggcaggagaatcgcttgaacccgggaggcggaggttgcagtgagccgagatcgcgcctctgcactccagcctgggacagagcgagcctccgtctccaaaaaaaaataaggaagctcaagatgaagagtcagaagtggtaacttgtttgttgcacaagaaacaaatttagcattctatttaggggatccagattaccaaaaaaaaaaaagaagtgaagttatttctgcattaagtatattaataaaactttatcactaaaaacaattctgtaagaggaacgccaaggaaaaaaatatttgagtttttagagaagtcattttttaaacttttagaggttgtgacatttaagtaacataattttatttagtacctagtatgcaaagacattgtactgggcatggcagcaaatagaaagctttgtaaatcgcagtgtcccatctaattaacccgcattctaacaggtggttttattttgctggaccgcaccacagtcaggtaacaccaagaatatcgctaatgtaattttttaagttgatatatttaggattccataaaagtcactgaaaataactgagagcatgacatgtcacaaaacaagggaaagaaatcattttgaggatcagtcgctttacatcttttgtaactaatttaatccccaaaggaatccaataaagtaaaagttattctaaattgaattttaagcatgagaatgtggaaattactcgtcaaaagtcaaaaataatcgtgcagcagggcaaagactaaaggctggcatcagaatccatattcttttcactgttgatgtgctagggctgcaggaacaaaatactgcaaactaggcagcttaaacaaatttattgtcagaggtctgactggaagtcccaaatcaaggtattggcagggttgattccttctgagagctgtgatgggagcctgttaatgcatctcagcgtctaggcattccttggcttgtggcagcatgcccccgccagtcttcacatgacgttttccatgtccgtgtctgtctgcacacttagcgttctttttatgaggacatcagtcatattggagtacagtagacgctactttaatatgacctcatgttaactaatcatatccacaacaaccctgtttccaaataaggtcacattataaaatactggaagtgaggtctttaacacatgaatttgaaagggggacacaatttaacccataacacactgtatcctgaaataactatccaatgtaatttttttaaaagacacaaaactagccgaaattataaaaggttatgattgcaatcctggtatccagttacattctccctcctgcagaagctgtggagaatcctgtctcagaaaaccaatttctattttgtcacatgtccatctatgcaaaatacatgtactttgtccctgacatagggcaacaatgctgaatttactaagactcatttttgcgcatggtttgatagggaattaagatttactaggtattctgtcattgtcctcattactgattattttaactgtgtctcaaacacttggatagtacactatagtgttataagctgtttgacatgtcgcttcctaaattctcaagttatatatatgtgtgtatatatgtcatgtaacaggcacaactgttttcatgtgtatcactttattgcacttcacaggtatcatatgtttcttacaaagtggaggtttgtggcagccctgcatggagcaagtctgtcagcaccatctttctaacagtatgtgctcacttcatgtctctctcacattttggtaattcttggaatgtttccgttattaaatcagttatagtgatctgtgattagtgatctttgatattactgtcataattgcttggggggcaccatgaaccacccctatataagacagcaaactgagtcgataaatgttttatgtgttctgaccactgcactgaccagctgcctccctatctctctccttctgctcagacctccctatccttgagacacagcaatactgaaattaggggccaggcatggtggtggctcatgcctgtagtcccagctacttgggagactgaagcaggaggattgcttgagcctaggagttcgaggctgcagtgagctgtgatcacgccactgcacttcagcatgggcagcaaagcaagaccctgactc

SEQ ID NO: 59184 - DNA, 2491 bp, Homo Sapiens
gatgcgaatgttgtcatcagggtgggtgaggatgtactaggcactgtgctaagcattttacatatactatcttattcaagttttacagaagtctaccataaatactattaccaccccattttgtagttaagaaaactaatgataagagaggtcaggtgagtagctggtagttacatagccagtgagtggctaagcaagaattcaaatagaggctttctgaactccagggcccacacttaatctttattctgcattcctcccagggagccttcatgtgcacagcatggcactgactgcagaagtgtgcctagtattgccatagtcaaagggcacatcatgcactcagcttagaaaaagggacagttcccaaagagggggaaaaaaaaaaaaaaaaaagggacagttccttaaaaaaaaaatactttgtccccaacattccttataaaagtcaatttaatgaatttctcagactattattttagatccatcactcagtaacccttgtccatctatatccgtactcctcttcccacctccagctccagatttcctgaacttttgtttctgctgcctgttcttgtcagaaactgtgcaaccttggttctgtgggtatgtgaatgtcaggttggcagggtgcagctgtgtggttccagatgaccagaagccacaagcggttgctgcttctctcttgggattggttggggagtgaagggcagaccgacggatgccttggttgtttttgtgtgtgggtatcatggggcttcaaactgttgtgctctttgttggctggttgattttgtagctcatgctcttgaggtgctctttcaggtctctccctgttttcctctgaattccactgttttgttatctcttgttagcatacaactgaccttgtttttgaagctgtggagagtagctggtggaaatacctcttccagttgggaaaaaatggacttaaaatgtcccatgtccaggctgacctggatgatgacagttggttgatgagttaatttgaacatgagcagaaatgaggtcacttgcctgcctgactccatgtggccatgctggctccaggttgcaaagttctttgagcaagtaccttgtcttgcctaatctcgaatgtctgttctttttatttcttatctcaaataggcattgtgataacattataggtgcaaaagtatgaggtctaaaggcctctgcttccctgtactccctcagtttgtcctgagcagagggagccccaagccagatggattggatggagaacagcccataggcagtttgcagttgtgggcgcgtagctgggagcatgctcagaaactgattcttggcctcacgcctataatcccagcactttgggaggccgaggcgggtggatcacgagatcaggagatcaagaccatcctggctaacatggtgaaaccccgtctctactaaaaacacaaaaaatcagctgggcgtggtcgcgggtgcctgtagccccagctactcaggaggctgaggcaggagaatggcgtgaacccgggaggcagagcttacagtgagccgagatcgcgccactgcactccagcctgggtgacagagcaaaactccgtctcaaaaaaaagaaactctgattcttgcacctctacgctactgctttggagaaaagcaagcagctgcttgtcaggactaaacttgtaacatgcaggcctacctccattaccctgacattcattggttggcttctgtttgagagggcacagtatctttgtatgccatgattgttttcatataacgtaataacctgctgctgacttttctcaacatgtcctttctgcttatgatgttctttctccaggctgctttgggttctcttgtaaggcccgtacagcagctgtcactgagatactgcctcatgacaaacctagaactggctagtgaaaagagcttctcaagagttaatatgagctggacacagtggcttgggcctgtaaccccagctactctggaggctgaggcgggaggatcacttgaggccaggagttcaagactggcctgggcaacatagcaagatcccatctctaaaagctttttttaaaaaaattagctgggccgggcgtggtggctcacacctgtaatcccagcactttgggaggccgaggcgggtggatcacaaggtcaagagatctagaccatcctggccaacatgctgaaaccccgtctctactaaaagtacaaaaattagctgggcgtggtggcgcacacctgtagtcccagctactcgggaggctgagggaggagaattgcttgaatccacaaggcagaggttgcagtgagccgagatggcgccactacactccagcctggcaatagagcgagactccgtctcaaaaaaaaaaaaaaaaaaaaaaaaaaattagctgggactttgggagaccaaggcgagcagatcgtttgagtcccagagttcaagaccagcctgggcaacatggcgaaacgccatctc

SEQ ID NO: 59185 - DNA, 555 bp, Homo Sapiens
  misc_feature (479)..(479): n is a, c, g, or t
  misc_feature (532)..(532): n is a, c, g, or t
  misc_feature (549)..(549): n is a, c, g, or t
gtagagacagagtctatgttgaccaggctggtctagaactcctggcctcaagcaatcctcctgccttggtctccaaatggagagtatattattaaacccaaaagagtgaaatggagagtcaggctaaacacagtgtaattacaagccacactactataccacaggcatcattactctgcttttcctaagccctactttcgtaaaattgtgtatactaaatatctttgtttatctgacaaagaacaggaagaaagaattcatacattggcactaccattaattgcctacagtttctttcactattttacctaccagatattaggatgtatgacacaaatgtaggatgtcaaacagaagaacaatgcaatattgcaacatacagttaagtactcactcaacgttatcaataagttcttggaaattgcaactttaagccaaaagatggataacgaaaccaatttttaccacaggctaattgnttaaaaccagaggtaaggtcctaccggataattctgggcccaaaaaattcttnaaccttttaaataaggnccaaat

SEQ ID NO: 59186 - DNA, 522 bp, Homo Sapiens
  misc_feature (105)..(105): n is a, c, g, or t
  misc_feature (132)..(132): n is a, c, g, or t
  misc_feature (146)..(146): n is a, c, g, or t
  misc_feature (267)..(267): n is a, c, g, or t
  misc_feature (518)..(518): n is a, c, g, or t
gaatcttaaatcatcatttttattttaaggctaacattgcatatactaattaactgatgatgctgatcagatgatgtctgaatttttgaggctatatagtaaggnggttagaagtgcaggttctggcctcanactctttggttcanatatcacctgtacaagttatgtgacattggtcaagtcatgtaacctatttaaaacctagtttcttcatctataattggggataataacagtaactatgtcataaagttgtatgtacatganattgcctgtaaagtgagcaacaatgcctgcacatgataaattataataattattacatgttaataattattatcttcataatcttctaatggtctgaatcatattctcttatattttgaaaaacgataatgataacccatgtaaaacaaactcagataaccagaaaattcaattaaccaaacacagtcttaagctatacttcaatgatgactgctaacattctaagattctccacatagtagagactactntgag

SEQ ID NO: 59187 - DNA, 814 bp, Homo Sapiens
  misc_feature (22)..(22): n is a, c, g, or t
  misc_feature (568)..(568): n is a, c, g, or t
  misc_feature (586)..(586): n is a, c, g, or t
  misc_feature (591)..(591): n is a, c, g, or t
  misc_feature (667)..(667): n is a, c, g, or t
  misc_feature (693)..(693): n is a, c, g, or t
  misc_feature (774)..(774): n is a, c, g, or t
  misc_feature (778)..(778): n is a, c, g, or t
  misc_feature (796)..(796): n is a, c, g, or t
gagcatgttcaaatacagatgngtaggcctgtgggcttgggcacttaagtctgagtatggtgagccaaaaattgacgtatgcttgaggactgagtggggactcttaaatgctgttctgtgggaaaatcttctagaaggtagagttcatgaaatttccaaatatctcaatgttacaaaaactcaaaatggtggccatagtcataaagtatggcctccagtggatgagtggacgcgtggagttagaaataaggaaggtatctatttattttattttacgatttttttttgagacagagtcttactctgttgcccaggctggagtgcagtggtgtgatctcggcttactgcaacctctgcctcccgtattcaagcaatttgtcctgcctcaacctcctgagtagctgggattacaggcacccgccatcaagctcagctaattttgtatttttatagagatgtcgttttaccatgttggccaggtagtagagtaagtagctcaaataatcattaaacaaatgtataattaaaggctctagttaggaaaccagagacatctgtcttggctgangcagttagaaaaggcttncttangaaagtgacatttaagtaagatccctataccaatccggattgacaaggagagagtaggaattaccgagcaaaatgnggtcaggaggcttggggtagggaacntcttgtggaagaacagatgtggaagaacttgggaaggtgagcttgtaaatttgagactgaaagtgacatggtgctgtgcancaanagtggttgagtagggcancataatgtagattcctga

SEQ ID NO: 59188 - DNA, 525 bp, Homo Sapiens
  misc_feature (462)..(462): n is a, c, g, or t
  misc_feature (484)..(484): n is a, c, g, or t
  misc_feature (499)..(499): n is a, c, g, or t
  misc_feature (505)..(505): n is a, c, g, or t
  misc_feature (512)..(513): n is a, c, g, or t
  misc_feature (522)..(522): n is a, c, g, or t
ggtaactgcaagacacaacccagggtaaccagaagttactgtgaaattctcaaacttgcaaaagaagcaaatatctgcatataaaaattttgtttcaggagaatactagggggaatttagactggagaaacatttccacttgtgtattgaaaagaataaaatcattatttaaacactctaagcttcaaactttccattaatccaaactgacctacttattaactcaaaatgctagtgttttctcctatcatatacgtcaatacgcatattacaatggttgggcacatgagtatagggtctctatatctaaaactttgacttaaagttaaccaactatttctcaaatccttaaaataattttcgtggataatttttcaatagccttataaggcatacaagcataactggctacaaaaaagtgtatatgtaaagggagttaatggccttgcttaattaaaatgnaaaactttagcatcttaaaatncatttatgggatttnaagggngcttcannaagtccctnttt

SEQ ID NO: 59189 - DNA, 564 bp, Homo Sapiens
  misc_feature (467)..(467): n is a, c, g, or t
  misc_feature (483)..(483): n is a, c, g, or t
  misc_feature (533)..(533): n is a, c, g, or t
  misc_feature (546)..(546): n is a, c, g, or t
  misc_feature (563)..(563): n is a, c, g, or t
aacaattgagaaactacttaaagtgaacctaaaatggtgtgagcctgaagtgcttgctgggcagcagacaagctttgccagccttgtgttctcagtggaaatgcagcatccgagccatcctctcttccccccgcttgtggtcagctctaaatagcacactcacagcgcggggggaaaatatttttccctgtttcaagtgggcagtggaagtagtgaaagcctaagtaaactctgaccattagataatgggccattataactctggatgacttcctgaaggaccctgaaaaatgacttctcatttcctgcctgcagaaaagagaaatattaggatagtgttgtgtgcaaaaaaatgcaagcttgcaatgagagatgcagagtgtgagggagagaggcacgaagggggtggagaaaaaagacagagaatttgaggttgactcacggctttgaagggaaaacaggaagangaagaaagtctgtctnccatgggtcggcaacccacactttacacattttttccatggggcttgccncttgccgcccatnacaacttgggcttgccnc

SEQ ID NO: 59190 - DNA, 2154 bp, Homo Sapiens
gggtcaaggtcgacggtatcgataagttttttttttttttttttttctctttgatacatacctaggaatggaattgcggggccatgtgtggtaactgtatatttaactttctgaagaaccgccaaactgttttccaaactctaccattttacattcccaccagcaatatccaggtgttgccatttctccacttcctcaccaacacttgttttccatttttgtttttgttcttattatggatatcctagggagtgtgcagtggtatggcattgtggttttgattgacatctccctaatgattagtgatgcagaacatctttttattttattctttattttgatttttaggtcattcatacgtctttagagaaatgttcagaacatttgcccattttttaattgtgttactgtttttttgttgttgagttgtaagagttctttatatgttctggatatcatacccttatcatgtaaatggtttgcaaatattttctcccattctcttgtcctttcacttttgtgattgtgtctgttgacacacagaagtttttcattttgaagttcactttatctatttttttctttggttgctaacgcttaagtgtcatatcaaataaatcattccctaatccaaaatcacaaagatttacacctatgttttcttgtaagaagtttatagtttagctcttaacgtacttagatctttgatccagtttgaagtaatttttatatatgtgaggtacatgtaaggtaggagtccaaattcattctttgatatgagatattatcccagcactatatatagaaaagattattctttccccattgaattgtcttgaattgtcttggcaactttgttagaaatcaattgaccatagatgtatgggtttatttctagattcttggttctattccactcacctaaatttctgtccttatgccagacttggttagttttgaatccattttttagttaaatattgacttattccctgcatttaaacttcataaatataaaaagcaatctgtgtagtgcagtacacaatgtaaaatgactgtttcattgctttgcaaattccatcttagaagttttatggttctgtaatgaataattgcttgtagaaatttattgaattaatcgtgtatcattgggaatttgccaaaggagactcagaaaatcttttgggaataaaatcatttaaattttctgaatgctgactcaaatactcaaaattgctgttggtatttaatgataacttttatttttcatcttctaagaaattctgagagaaaatcaggaatgaactatgaagtccttgtattcctagtccctaataggacattttaataatatacagtactaattgtttgttgttacagttaagaattttacttttgggtctaattgttttttctaactaagttttaaagagaagggaaacttaagcaagtacattcattctaaacttgtgtatataatctttaatcttagaagtgcatctgtattttgatttttaggtcagcgtacacaagtagagttagttgtccgtagtccctcaccttatctgcggttttgctttcgtatggttctgaggtcagaaaatattaaatggaaaattccagaaataagcacttcataagtttaaattgcacaccattctgagtattgtgatgaaattcatgccatccacttctgtcctatctggtctcacctgggacatgaatcattcctttgttcagtctatccacactatatacaccacctgccgttagtcactgtgtagccatctcggttatcagctcgactgctgtggtatcacagtgcttatgttcaagtaaccttattttacttaataatggccccaaaacacaagagttgtgatgctggcaattcaagaagctttaaagtgctccctttaagtgaaaaggtgaaagttcttgacttaagaaaggaaaaaaaaaaaaaaaaaaggtatgctgagattgctaagatctacagtaagaacaaatctcccagctgggcactctggtttaggcctgtaatcccagcactttgagaggccaaggcaggaggatcacttgaagataggggtttgagaccagcccggtctacatggtaagactctgtctccaccaaaaaaaaaaaaaaaaaaa

SEQ ID NO: 59191 - DNA, 2436 bp, Homo Sapiens
cttgacatttccccagtccctgagctcatcttgaatttaaaaggaggctatctggaggctgggtggggactgagtcaccacctcccgtggctttctcatcctgagcagcaaccagacacacccagagggccactgctggagacctgcagattgtaaatgccacacaggctttcttcccagaagctcagatgggctcttgcgggaaggctgtcatcgtggttctgtatgtatttcttccttcccctagccactttgagaagttgttgcctgtcctttcccgcttcagcctttattaatgctgtcctcttcccctatagtgccctctcttcccctagaggcccacactgtcaaatgccacctcccccaggaagtttgtccttgctggctctggagtcccagcaggactcctgaggatgcttacggcatgaccttggcaggtcacgccacctttctgtgcctcagttttctcatatataaaatttgggtttcttgtctttataaagctccatccctagacactctcatttggcaggtcttggggcaggaatcacatgcccctaggtttttaaaccagctctctagaggatgctggtgctgagagcctgtcggctgcaacctgggaaaagctgaactgagaggaccctggtttgcatgacagcctagcttgttgctgtgtgaccttggattagtcagctttctgtacctccgttttcctccctatcagattggggtggaaatgagaactcgtgtagtaacagcccctcaataaatggcagtcatcaccatcatcagctttgttttgtgtggggattggtggttttcagaagcaagtcacctttcccctacttggtcctggcagcaggcactgtcaagtcagactgggccagggtgcaggctgtggaattgaacacctgagcaggaatgaagtcagcctgtctttaaacagccccatcgagggagaggagcttgcccaagggtaaacagctggctggctcctgccagagctgggacagggatccaggactaggacattacagtccagggctctttaacctcctccccactacctggttattcgagaatgcacctgcccttccaatagagcagggagacggctgtttcttaattcaggccccaatcctgcttgttctttgttagtccgtttgtaaagatagatgggcgtgcccatcgggatgtctgtgcagggggacagttggattttccatgttccatcccattgttgtttaagggtgggccctgcttggacagtggcacttggaataaagtcactttgtagttgtgagccttggctgcttttcctgcttcccctgtagagtaggggaacaaagacctcagccgagagaggttctgcagagagctggggtttgctgtcaaggagcttaggatgtcctagaactttggtgcagggaatgagatcagctgttcaagcgccttgtcttacagatgaagagatgaggcccagaagggccagggacccacagaggtttgagccaggacttctgggtcctgttccatggcactgcctttgaagaagtcactgtcatgctgttatcacctgcccctggtgtataatgacaatctctaacatcctttgacctttttactgtgtacgctgtgcttggtgctttacttcagctacttgcagtggaaaagaagaagggcttggtgcctggcctggaagtgaggggtgcaggatcccagttcccacatctcacccacttttagggatgtcactttcctttgggcttcagcttcctaatccataaaatgggaataacattccttatcctaagactgattctgaaatcatggaatccctcaagaattgtgtgagcagcggctcactcctgtaatcctagcactttgggaggccaaggcaggcaggtcgcttgagctcaggagttcaagaccagcttgggcaacaagacaaaaccctgttgctccaaaaaatacaaaaattagctgggtgtggtggcatgcgcttgtattcccagctacttggaggaggctgaggcaggaggacagcttgaatccagaaggtcaggaggtcgagactgcagtgagctgagatcatgccactgcactccagcctgggtaacaaaatgagaccctgtcgaccgggcgcgctggctcacgcctgtaatcccaacactttgggaggccgaggcgggcagatcactggaggtcaggggttcgacatcagcctggccaacatggtgaaaccccgtctctactgaaaatacaaaaattagctgggtgtggtggcacacgcctgtaatcccagctacttgggaggctgacgcaggagaatcatttgaacctgggaagcggaggttgcagtgagctgagattgcaccattgcactccagcatgggtgacaaaagcaaaactctgtctcaaaaaaaaaaaaaaaaa

SEQ ID NO: 59192 - DNA, 437 bp, Homo Sapiens
cgcaggaattttttttttttttttttttttttttttctttttttgggggtacaacaacctgtagccacatgagccgtatctacccaggagattccttgccagattggaaccatggagatgaacaaggctgcttctgggaagcccatttggaagaaaaagagggaactagaaagctgccaagtcaagcttttgaagcggagacaaagtcaaaagtttagacctccctcccaatgctggggatgggctgactgtttaaccatgtgcacaccaacccagtgcacaccaggtacagtgtgacagggtggctatggcctaaagcatgggttttgcaggcaggctgacgtgcattcaaattctgactcttcctgaccacacaacatggggctggtgatcttgactctttgaacctgtttctttgcaaaaaaaaagggggcaat

SEQ ID NO: 59193 - DNA, 2286 bp, Homo Sapiens
gcttcgcgtcccgcctctcgcctggctggccgtggggggcctggacgcagtggcctcccgaatctcccaggaccctaatatcgcccgaggatgctgggaggaacgctgagccgacctctccgttaggctgaagattgcacaaaccatgctaatggccagcatggatggagggagcgtgtgagatgtgtggggcagcgtgctgcatctcagccaactccaggagccagttgatgtgatggactaccttaattgatttttgaatgttgagccagccttatgcatgtgggataaacccctgttgatcatggctggctggagtgcagtggtgcaatcatggctcactgcaacctcaaattcctgggctcaagggatcctcctgcctcagcctcccgagtagctgggactacagttcctgctggaatcttgctgttgcccattcaagtctggtggttcctgtgtgttggggtggccttgcttctcctgctcttagctctggaggagccctcggctggtgctgcagtgaatctgtcagagtcgtcctaaccagagtgcccccatcctgaatagaggctggataaagccaaacctgctgggttatagtcccaggggattgggcagtcctggtcacaagatatttaaggttgagggaataagttaatgatgctaagtaaataaagaccctgaattctttcccgtgagagattcaagaactcactcttggcatctgggataagaccctttttccggtaacaaacccctgccctggccctttcttccttctggaaaacttaaaaaaaaaataggcctcaaaaagactgcattaatctgagaaactgctgaatatggctactaagagaagctgggattttctgatttttaatgtcggtttcaaagagagcaggtatactttgcaggagggaaccatgctagctgcagaatcatggacgagctggaccacaagtttttacacagtgtgcatgcttttgttctcctgtcaacttctgttgttttcctgtcaacttctgttgttttcatcaaaagccatcaacccgcctcagccagggcatcataatgtacatgcaacagagtgttccaagaaactttcagctgagaccctaagaccctggacatgcaatgccagagtgaagtgtgaggaccacagctgtgcaggacatgcagaaaggaggggcagagagccaatgagatgatgtcccacgactcacctgtgtcagtggagaccgaaggagacttggagggtgcttttggagagaactgctgatgttttgtgagcctcactctctctgtgtgtggaaatgctggaggatgaaaccgtctaaactctcctgaagtcccgggaatggagttttaatggtaatgtgtgatgggatgtgtgttctcttatggtatgggagacacagaggactcacagaggactggcctctgcctcttgaccagggatcaggagagatgggaactgagctggtcagctgctcttcagagctggtcgaggagagatttctgctgtgctgggagggcctaaaaacatgcatggatggagcccaaggaccaggtgcagatcttatgcaagaatgaaccagggggtgacttaggtccaccaaaagactgcccagagggacaaaaggctatcagtgaaaagaatccacagatgaactgccagttcctcagggctgaggcaagatcttaattttgagtaggagcagagtgtattacctacaacaaggataccacagatgagaaaaccctagttttaaacctgctacatccaaagagagcaatgcaactctggcagtagcaaaaatgttgtgcctctcctttcctcactcctaatttcccatcccagagaagggtcagaaaccatcttctgcaagatgggaggaagggtagcagccagactgcaaaaagggagaagaaaccagctacctcttgctgttctcagtggcagactccccacctgcaacaggtcaggtctgttatggagagaaaagacaggacatttttaaattctaggtatagagcaataaaagaagaattcaaacaaagggatcaggaagaggattgctactaagaggcagagaaaccaatgaagccttttgccatctcacactggaaagacaaaaagtcatagaggcttgatttttataaggaaagagaagtgagaaactgacctcgatactttgttggacttgcctaaagacatttgctgaattctcgggctgtgctgggatggagattagaggccaaataaaaacctctggtaagtagtgc

SEQ ID NO: 59194 - DNA, 654 bp, Homo Sapiens
cgggttgcttgggaatgcagcccaaagcgggtggataactcttaggatttaactctttgaatattatctcttgaataaagcatgtgttaatgttaacaaaaaaaaaaaaaaaaaaaaaaaaaaaaaaaaaaaaaaaaaaaaaaaaaaaaaaaaaaaaaaaaaaaaaaaaaccaaaaaaaaaaaaaaaaccaaaaaaaaaaacatgtggcccccttggcccaattaaattttaaactcgacaaagttaagccatgcgcccaaaattcaggttaatttgccaaattcccctaaaggggagccgattaaaaataaatggcccgacgtttaaaaacgtgggaattggaaaaaccttgccgtacccaaattaaatccctttgaaaaaaatccccttttcccaagttgccaaaaaaccaaaaagccccgaacgaatcgcctttccaaaaagttgccaaccttaaagggaaatggaaaattgaaagcttaaatatttggtaaaaatcccgttaaaattttggtaaaataagcttaatttttaacccaataggcgcaaatcggcaaaaaccctttataaataaaagaattaacccggggtttgagtgtttttcccatttgaaacaagaatccattttaaagaaccgtgacctcccgtgggcc

SEQ ID NO: 59195 - DNA, 1319 bp, Homo Sapiens
cgagagcacgcggagcagcgtgcgcgggggccccgggagacggcggcggtggcggcgcgggcagagcaaggacgcggcggatcccactcgcacagcagcgcactcggtgccccgcgcagggtcgcgatgctgcccggtttggcactgctcctgctggccgcctggacggctcgggcgctggaggtacccactgatggtaatgctggcctgctggctgaaccccagattgccatgttctgtggcagactgaacatgcacatgaatgtccagaatgggaagtgggattcagatccatcagggaccaaaacctgcattgataccaaggaaggcatcctgcagtattgccaagaagtctaccctgaactgcagatcaccaatgtggtagaagccaaccaaccagtgaccatccagaactggtgcaagcggggccgcaagcagtgcaagacccatccccactttgtgattccctaccgctgcttagttggtgagtttgtaagtgatgcccttctcgttcctgacaagtgcaaattcttacaccaggagaggatggatgtttgcgaaactcatcttcactggcacaccgtcgccaaagagacatgcagtgagaagagtaccaacttgcatgactacggcatgttgctgccctgcggaattgacaagttccgaggggtagagtttgtgtgttgcccactggctgaagaaagtgacaatgtggattctgctgatgcggaggaggatgactcggatgtctggtggggcggagcagacacagactatgcagatgggagtgaagacaaagtagtagaagtagcagaggaggaagaagtggctgaggtggaagaagaagaagccgatgatgacgaggacgatgaggatggtgatgaggtagaggaagaggctgaggaaccctacgaagaagccacagagagaaccaccagcattgccaccaccaccaccaccaccacagagtctgtggaagaggtggttcgagagaagtggtataaggaagtacattctggccaggcacgatggctcatgctgtaatcccagcactttgggaggccgaggtgggtgcatcacctgaggtcaggagtttgagaccagcctggccaacatggtgaaacccctcgctactaaaaatacaaaaattagccgggcgtggtggcacacacctgtggtcccagctactcgggaggctgaagcaggagaatcgcttgaacccgggagacggaggttgcagtaagccgagttcactccattgtactctagcctgggtgacagagcgagattcgtctcaaaaaaaaaaaaaaaaaaaaaaa

SEQ ID NO: 59196 - DNA, 610 bp, Homo Sapiens
  misc_feature (490)..(490): n is a, c, g, or t
  misc_feature (561)..(561): n is a, c, g, or t
  misc_feature (609)..(609): n is a, c, g, or t
acctttaagtgaggacaatggcacttaataaataggactgttgtgaaaattaaatgagtagatacatataaagcagtcagaacagagcctggcacacaataagtacaatgtatgtgttaactagttgcaatagtggaactggaagactagtagtaggtagcatatcaagttgtataaaaccttgagccaaatatgggaatctcataataaaccttcatagagttatcattcttagcctctataatacactcatggctaatgtaatgcacagaaaatcaagctaaacaaactcaataatttcacagcaagtaggtatatctattttacttctgggatagagtgaatggttgaatcagcataactccacagtttttaattgaagaattttaccattaatggccactggaacaggacactgactatacttttcagctaatgggatgggctccagagaccacactggatgttgcacaaacaactggatgtgtgntttgggcatcattaaaataaaagttaccatggtaaatacggcagaaaatcttgcattggaaggagctttgncagcatttgcagcttggacattttatggcagcagaccagttggtaacng

SEQ ID NO: 59197 - DNA, 4227 bp, Homo Sapiens
cctaaattcctttatattgccttagtattaaggataatattatcttgcataatcttcctctgaaatatttattacttcccttcttaatgatttggaaaagcagtgtattttagataatatcttcttacagatactccaagtatcacagctaaattaattagtgaacaaaaagatgacaaagaaaagaaaaaccatgaagagaaagaaaaagttaaagcggaaaatggatttcaagacaattacagtgttgttgttgcctctgggctgaagtctcaatctaaacgtgctgtgtcagctacaccacctcgcccaccatccaggagggggaggacaatacctgataaaataggaagtacttcaggagcagaggctgccaacaaaataattactgtcccagtgtttcacctgtttcacaaactcttggcaggccagccattgccagctgaaatgacacttgcccagcttttaactctcctatatgaccgaaaacttcctcagggttaccgctcaatagatctgactgttaaattgggatcaagagttataacagaccccagtctatcaaaaacagattcttataaaagactacaccctgaaaaagatcatggagacttacttgctagctgtccagaagatgaggctctcactccaggtgatgaatgcatggatgggatactggatgaatctttgcttgaaacctgtccaattcagtcaccattacaagtttttgcagaaatgggtggactggctcttattgctgaaagactacccatgctatatccagaagtaattcaacaggtgagtgctccagttgtaacatctaccactcaggaaaagccgaaggatagcgatcagtttgaatgggtgaccattgaacagtcaggggagttagtttatgaagcaccagaaactgttgcggctgaacctccacctatcaagtcagcagtacagaccatgtctcccatacctgcccattctttggctgcctttggaatatttcttcgtcttccgggctatgcggaagtgctactgaaagagagaaaacatgcccagtgccttcttcgattggtattgggagtgacagatgatggagaaggaagtcatattcttcaatctccatcagccaatgtgcttccaacccttcctttccacgtccttcgtagcttgtttagcactacacctttgacaactgatgatggtgtacttctaaggcggatggcattggaaattggagccttacacctcattcttgtctgtctctctgctttgagccaccattccccacgagttccaaactctagcgtgaatcaaactgagccacaggtgtcaagctctcataaccctacatcaacagaagaacaacagttatattgggccaaagggactggctttggagcaggctctacagcttctgggtgggatgtggaacaagccttaactaagcaaaggctggaagaggaacatgttacctgccttctgcaggttcttgccagttacataaatcccgtcagtagtgcggtaaatggagaagctcagtcatctcatgagactagagggcagaacagtaatgcccttccttctgtacttctcgagcttctcagtcagtcctgcctcatcccagccatgtcatcttatctacgaaatgattcagttctggacatggcaagacatgtgccactctatcgggcactgctggaattgcttcgggccattgcttcttgtgctgccatggtgcccctattgttgcccctttctacagagaacggtgaagaggaagaagaacagtcagaatgtcaaacttctgttggtacattgttagccaaaatgaagacctgtgttgatacctataccaaccgtttaagggcagtgatcacaaccagattcaacgtatgcacaaagcagcggataccatggtagcggccgtcgctgattgcttttaccatgttggatccattgtcagtctcaaagacctacttccagctaggtgccttgaactcaaatagcttttcacacagacttcaggatgtgagctaagatctaaaagggaaaatgttaaaacaggagtaaaaccagatgcgtctgatcaagaaccagaaggacttactcttttggtaccagacatccaaaagactgctgagatagtttatgcagccaccaccagtttgcggcaagcaaatcaggaaaaaaaactgggtgaatactccaagaaggcggctatgaaacccaaacctttgtcagtattaaagtcacttgaagaaaaatatgtggctgttatgaagaaattacagtttgatacgtttgaaatggtttctgaagatgaagatgggaaattgggatttaaagtaaattaccactacatgtctcaggtgaaaaatgctaatgatgcgaacagtgctgccagagctcgccgccttgcccaggaagctgtgacgctttcaacctcactgcctctgtcttcatcctctagtgtgtttgtacgctgtgatgaggagcgacttgatatcatgaaggttctaataactggtccagcggacaccccttatgcaaatggctgctttgagtttgatgtgtattttcctcaagattatcccagttcaccccctcttgtgaatctagagacaactggtggtcatagcgtgcgattcaatccaaacctttataatgatggcaaggtttgtttaagcatcttaaacacgtggcatggaagaccagaagagaagtggaatcctcagacctcaagctttttgcaagtgttggtgtctgtccagtcccttatattagtagctgagccttattttaatgaaccgggatatgaacggtctagaggcactcccagtggcacacagagttctcgagaatatgatggaaacattcgacaagcaacagttaagtgggcaatgctagaacaaatcagaaacccttcaccatgttttaaagaggtaatacacaaacatttttacttgaaaagagttgagataatggcccaatgtgaagagtggattgcggatatccagcagtacagcagtgataagcgggtaggcaggactatgtctcaccatgcagcagctctcaagcgtcacattgctcagctccgcgaagagttgctgaaacttccctgccctgaaggcttggatcctgacactgacgatgccccagaggtgtgcagagccacaacaggtgctgaggagactctaatgcatgatcaggttaaacccagcagcagcaaagaactccccagtgacttccagttatgagctgcattgatgtggacttcatagacacaaaggcttcgaagcacaagccaaatatgtcaatatttgtatgtaagaagctaattatgtaataggtaatgaaactgaaactatactatgcccttaaggagatccagtttaattcaaggtgatcttttatttacctgtacaggagtgtaaacttttttgtgcttttatttttcaattgtgagaaccactgattggtatgttcaacaaatttgtgtatacaaagaaatggataaatcactgctatataagggaaactaccttaggaaagaatgtttactgaatgtttattttatttttttttttttttactatagagtgaggggttgttaacaaagaatatatattggtcattcttacaactactatttaaagtcagcaacttttcacagaatttgatagattttatgtttggccatatcttcatgctcacatttgatttctgaagacctcctacatacacttcaataaaagttaaatggacatactccctctttttttgatttactggtacatttttaaaataataaatctgccataaaatgcattatatctggagacttgcacttgtatggatgaatttattacattcaacatatttaattttatgccttctaattctaagatgcagaaaaaaataaatgaacatgattttattctatgccaacatttgggcctctgaatgtatctgttatttgaatttaagtatttgaaaaggaatggtcaatttgaaagtcattctaaactgattttttttttctaaagggctccttttttcctggactatgtggttttatgactaaagtcacatgtatgtattaaacattgaggctctgtagaggagagaggatgtacctctctggtgctgttacagtacattctgtacctgccatacaggctcattttcatgcaaattcttcctagagccaaataaataaagacttaggtg

SEQ ID NO: 59198 - DNA, 632 bp, Homo Sapiens
  misc_feature (465)..(465): n is a, c, g, or t
  misc_feature (491)..(491): n is a, c, g, or t
  misc_feature (554)..(554): n is a, c, g, or t
  misc_feature (572)..(572): n is a, c, g, or t
  misc_feature (605)..(605): n is a, c, g, or t
  misc_feature (613)..(613): n is a, c, g, or t
  misc_feature (626)..(626): n is a, c, g, or t
caaccaccaaagctgtaacttttatttgccaatagatattttaataaacaggcttactccatctgtaagaccctgataatgcctcttaggaaatcatagaaaaataaaatacaataattagtaatttgtaccttgtacaaaaatcttattatgttgctcagcaggtagtttgctaaacagcatattctttcagcaaatagatgacatatgttatgcaattcaccacaaacaacccctcatattgagagctgagcattctataacactattaacttgtaagcatgccagcacatgaaaatttacatggaaagttattaatattatagtagatttttgtaagataaaaatagtaccaccttcaaataagtctggactacttcactgctatagtaaagtagataataggtaggattgcagttcaattgttaacacctttttaccttgtttatagctctaccatattgngattataaccagaaaagagaatgtangctgtgtcaggaacctgagtggaaggcatatattgaagctttaaatggtgacagaatactaangagaaaaccttaaacagngctatacttcctatctcatagataaatcttttnccctttgnaagaccaatgggncagagt

SEQ ID NO: 59199 - DNA, 4528 bp, Homo Sapiens
ctgattgatacctggtatttaaaataacatgtttaaaaaagattcctgaattttgttgtatctgtgagagataccctagggaggatcataagtctactatgatcataattgtgttcctggtctagtctatccctttaatgttgggagttgagaatgggagaatataaaagaattcttttggttcaggtaaaaaagacatttttagaaagttagcatgggatagtgaggaaaaaaaaacaaaacaggcttttatttagaagatttgtgttcaaattctggctctacatctaattagttatataactttattaactttaccaaggctcactttactcatttgtaaaatgtggataataataataaattcctaccttacaacacagctttgtatttggtgagctaatgtatgggacatatagtaggcatttaatagctgatagtgaaatctgaacctggggttcattggaccttcttaagaaaattttggtagatagatatataaatataagtatcatgtttatgtaatatatgtattcctctcccccctttatatctgcatcccatgtcttgtttccagtaggatttaactggtatgtggttgataagttaacttttaaatgtatgtaatagccagagccttttaaagttatcttaaaatgttcactgtaaagcttcgttaatagctgctctaaatctgtttgtcaagtgctttccactctcttccagtttctgctaatgctactgctattgcttactacattatccaagttggaaaccttggtatgatctttcctgctttctcttttctttgtaattctgctgtctagcaggctatttctatgcaaaactaatactgcataaaatattgtcaatgccaatgtaaggtagacagcttagcaagtacatggacttgaaacaccagagtatgctaagcagcactctatagctgtaatgtattaccctttgtcaacagatttctgagacatcaatgaaactcctaatcatgtccgtttatacgatataataccaattttacagtttttttctgcttaattctcattcttattttcgaatggtagtagtatcaatggcagacttctgtaaaactaggactgacatacttagatgatgagatcttgttattccataagcggtaggataccagatgtggtaaacaaataacctctagcagcctgaatggaaggatgtggtaggctggattattgttcagcaaatattcattccctaacctaccccactcccaatagccccccacccaacctatgagagcagtctgtttcgtcatccaattgctattggacttggtcgtgtgacttgatataaccaatggaatgttagcaaatatgccactagcaaaggcttgaaatatgcttgtgcagttggacttggtctttgcacttctattgtttgccgtgagaagaacatgcttctagtagctgctaattcaagaaggatgaaaagcactggctctggacctgatctgcagcttggtaccaagcccagtgtagtccagcctacagccaagtcccagataatgagcatatatgtgagcaaggaagatatacttgttgtatgctgctgaattttgaggtggtttgttactcagtattgtggcggtagctgacaaatacagaaggatactcatttcttttaaagaccttctttaggcactgttttggaagctgcagctttccatgtagcatcaagaactttattgttcaatggcacctattttaatgccagttttgtctctggttactggcaaaactgttcaggattgaaagctcgctttaaagaaatgcttacaattcagatgggaagaagagtgctggttgaccctggctatctccacaaacctgtctgtacttggaagttgtttctaggaaaatatatggccagtggctcctttttttgttgttggatcagctagttgtatgtccttagtggtacaaagggcagtgaatacacaaagatagtatctttaattatggaaggagcctattaaaattccattttatcttaagaagtaaacatgtaaaggaatctggaggaggccaaacacctctttaaaataatgattgtcttgggctaattcctttactgtgccttcagcatcattagatgccaatcctactgtgtaggttcattttcaaacaaaactgattagagactggaggctgtgtgcatgagacctccctaaagcagaggtttcagaaacctgcacattgtttaaactggttaccctcagcactacttttatttattttctctctacatgggggggaaaaagaaggttgtttatttcaaagggtattagaacccattcttcaaaagagaataccgaaaaagagaaaaaaagatattgtgtaaaagctcagaaggttttcagaatttcccttttttgcccattgtaaacatgatctttccctttgctctgagctcccccctctggcattaatggtatatttctctttctgttactacaaacttcaaagctcccctccaagtcattttgcaaactgtaaagtaatggtgggggctgcttttatttcccagagtttgtggtgggggtggactgagaaatgtagaggaactgttggcaacatttattaacttttaatttggtgcagaaaaaatcggaaaccaagtaccatacaccattgatgttgcttcaaagatactttgagcttgtttaaccaattttttaaagcttgtgtgccggactgaaatgaggtgccttttatacagacctcaggattgtgctgtcataatagataaatccatatgtctctttgtttttgtaattaaagctttatccttcctcttttttgtcttcaatggctatctttgttctgatagagaccgattgctttattgtaagtaaactcctaactattgtgtgatattctctttaaaaagaagactggtgatgcctaatttatttagcaccatctaggaatctgattttcagtgtggcttaattttccagaaaatagtctctccccttttagcattaaagattgtattttaacatctttaatggaaattttataaagtacatttctcagatttggtccttttgtcacaatatactgagcacattcagactttttctggtgactgaaggactgtcattttgaacctggttaatcgatgctttggttgcacttttgcacactaccctttattgaatgtattgtgatacgtcagaggtcatcttgtcacatgtgaaggcacggacaacgttccatcgtgctgaaccagtcccagacttccattaaaaaaaaaatcatacttgttcactcttcataccctctgtcttttttttccttgctttttgggggtaggttatcatgtctagctattgatcgtgtctgtttcagacaagctcctcttgctaagttgctcaactattgtggtataagctgcaaaggcagagaaccaaggtggttagaattgtgtgtagaataagcgaccagaaagcactctgtggcatcatgcacatgaattctcagctatggattgtataacataaggacattttgcccctggaaatgtcccttttttcttaattctctcttccttagtttctgctattcttagtggtccaggctgccaggtaaattaggtattcttctgttaacaatggcagtcaaatgatacctaaaacacctttattgtagaattctctatcctagtcccatccatctgtatttgtgttacttaagttttagctattccatgaagatccatttctgggaaaaatgctccgttatctagtgatctgttaatttctagaagtatctaggttgagggtaaagtttttgccgtttattttgccacctagattgtgctgaatggataagtgaatgaatatgtttcttttgatactgaagcaagtgggttttttcttttattttttgtgattaaatatttggttagtttcttttttcctcttaatttgttcttacttgtcctttattccttagagccacataaggaagggcagggggaaagaatttgaattatctcagtgtttttttttttttttttgtttttttaaaggagatagaatttgctcttgctatttatttcaagaaattggtgatcttgcatcagccggcttgtttttgaaagatgtttttcttggcatccatgcaaactaacgatatgaactgtatcaaacccagagtggcgtgggccttccttgtactgccttctgacttcttcagctgctatgtctgtacttgccctcctatgtgccctgagctctgccctctgactgagaagatctagaatttgactgtcctctttaggccagagctatcattactcatataaatgatattctttttgagatagctttctcctttcctcttcatttggcatcaaaactaataaatgatgaaactaacttcctttccagtaattagaacctttctctttttctcttttttgtctctcttttcctgagtgaaggcagtgtggtgttaaaaaaaaaaaaaaa

SEQ ID NO: 59200 - DNA, 2201 bp, Homo Sapiens
gtgatagaagatggctggcattccttccttcctgagcaagaatttgaactctattcttcagctgtgagttaacttttgagaactgtggattatgagaagtaacccaataccttatttgacttgtgaaaatgatcacttcttttgaagagtaataaggtgaagttgacttatccattcctaatcttaatatatttaaaaggattgaagccatgcagagtatgatctctgatcacaaaggaattagattaataatcagtaatactaagatatctaggaatacccccaagtatttctaaattaaacagaacgcttgtaaataatctgcatgtcaaagaaattagaaaacattttgaagtgagtgataatggttatgtaacatattgaaatttgtggaatacagacagctaaggcagtgtttagagataaacttacagctttaaaatttttactagaaaggaaagtctaaaattattgacctaagcaccaatttaagaagctagaaaaaaaaaagcaaagtaactagaaagaaaaaataataaaaataagagcagaaagcaataaaataactagaataagtaagtttagcaaagttggttgatataagatcggtatacaaaaacgaattgaattggcaacaagcgatctgacaatgaataaaatatttacgaataaatttaacaaaagaaattcaaggtctatacactgaaagacataaaacattgttggaagaagttgcaagagatctaaataaaaggagagatactgtgtacatcaattggaagacaatattgttaaggttagtggttggctgacttttgtgaaagaccattagatagtagatattttaagctttgcaggtcatgtggtctctgttgtaactactgaactctgctgttgttgcacgaaaaaagcaatcagatgagacatcagtgaatgggtggtgctatgttctaataaactttatttgcagaaacaagtagcaggctggatttggctcattaaagtggcagttctcccttaattgatctgtagagtcagtgcagtccctgttaaaattctaataggtgtttttgtagaaatggacaaaatgatacaaattttatggaaatgcaaatttaaatatataagtttatatggaaagtcaaaacagctttgagaaaacacttgattactgtaaagccacagtaatcaagagagtatggtattgctgtaagcgaagacatacagaccaatgaaacagaatacagggtacagaaataaaccttccccttaatgctcagttgatttttgacaaaagtaccaatacaattcaattgggaaaggatagctttttcaaccaatagtattggaacagttggatatccatatgtaaaaaagataaacctagacccttacctcacatcatccacaaaaattaactaaaatgtattatgcaactaaacatgagaactaaaactatcaaacctctttaagaaagcacaggagaaaatctttatgaccttcagttagacagagattttttagatatgacaccaaaagtgactgaaagcaggttagtgatttcctagtattgggtgttacacaggtgtatacaactgtcaagactcatgaaattgtgtagtcaaaatggattcagtttattttttataagttttgtctcaataaagttgactaaaaagaagataaaagaataatctaatgcaaatgttaagtagctgattagaaacagcttaggagaaaataagtgatttgaaatatagatccgaaataattactcagaatatggaacagagaaggaagatggaaaaacagagaggttagacacatgcatgcttaataaaggaagaagatccaatatttattacatgggagtttaggataaaagatgatagaggctggttatggtggctcacacctatagtcctagcacttaaggaggctgaggcaggcaggtcacttgagctcaggagagtttgagaccagcctaggcaacatggcgaaaccccatctctatgaaaaaatttagctaggtgtgataatgtgtgtctttggtcccagttacctgggggtctgaggtgggagaatggcttgagcccagaaagttgagtttgcagtgagcagtgataatgccgctgctctccagcctgggtgagagagcaagaccttgtctccaaaaaaaaaaaaaaaaaaaagaggaagac

SEQ ID NO: 59201 - DNA, 1594 bp, Homo Sapiens
aaaagtccttccctaagactatgtctaagacatacattaaacaagcaaacaaataatatatcacatataacacagcctagcaaagagtaggtactctcattacctactatttctcgctcacattttctccctaaaatgagtgttatttttatgataatttgttctgtacccttcatgcaaacaatctttgaaattcttattcccaatgtgatgtggaatgacttgttccatcattccttagcaaggttaaggtactccagtaaatattttccttttcttagatatagatgtggtaagatgttaaaaggaggtggtttgtggcaaggcaatgttttaaaatttaactttttgttaacattttaaaatgtaaataaaaataatttcctgggttttggaaaactaagatttggagacattagacccacattcttttaagtaaagcacttcgttcatatagattgcccagcccctgtaggcatttgaatttactaccttggcttaagtacagtcttgcaaactctgtcccctacactcttctaggtcaggggagataagaaggagagggaagaactaagttatgatgaaagcagccataagaagggggcagaaatggggtcatttgacccttcgtcttctcaaatcagaaactcattgtgtggctgtgcctttaaattaaccatttactttcatggagttacttcaattgctcttctaagacataaatgagatgcctgtttctttatattcttaccctgtgtagtacttgctggtggtggaaagccatgctacctccctgaattcccaggattgtgatgcaaggtctaatgcagtagttctccaagtgtggtctgtagaccttatggggtggggggtccctgagaccgtttcagggagttcacaggtcaaacaattttaataataaagctaacgtgttatttgatcttttcactgggctgacatttgcactgatggtgccaaagcaatgttatgtaaaactgctgatgttttgggcaccaaactggaacaaaaccttatattctttaccactaagcatctgccggttaaaaaaaaaaaaaagaagtttaccttaagaatgtccatccatgatgaagtggtaacaatttttattaaatctcaatcctgaaattcttaagtacttttttagatttctttttgatgttctgtgtgaagaaaaagtattcctactacatatcaaagtgagaaactgtgcttgtgctattgagttgcaagttaaactagccttttaaaaaatgaaacataatggacgatgtggtggctcacgcctgtaatctttgggaagctgaggcgggtggatcacgaggtctggagattgagaccatcctggccaacatggtgaaaccccgtctctactaaaaatacaaaaattagctgggcgtagtggtgcatgcctgtaatcccagctacttgagaggctgaggcaggagaatcgcttgaaccagggagtcggaggttgcagtgaatcaagatcacgccactgcactccagcctgacgacagagcgagactctctcaaaaattaataaataaataaataataaaaaaaaaaaaaaaaa

SEQ ID NO: 59202 - DNA, 559 bp, Homo Sapiens
  misc_feature (414)..(414): n is a, c, g, or t
  misc_feature (446)..(446): n is a, c, g, or t
  misc_feature (528)..(528): n is a, c, g, or t
  misc_feature (553)..(553): n is a, c, g, or t
agacagggtcttgctctgtcttcaggctggagtgcagtggtgtgatgatcttggctcactgcaaactccacctcccaggttcaagtgattctcctgcctcagcctcctgagtagctgggactacaggcatgtgccaccacgcccagctaatttctctatttttagcagagacgggtttaaccatgttggccatgatggtctcgatccacctgtcccggcctcccaaagtgctgggattacaggcgtgagccaccgcacctggccaagtcctttgtaaaatttaaattaagccactagaatcatatgcaggaaaggagaagatttttattggaatatctagacttagaggctaagaaaaaattccaaaaacaattaacaaaattttagtttataaaaacttagcatattgaagtntaacccccaagaagtggaccctacgcaactgnggacttttgggtggtgatgatgtggtcaatggaaggtcatcgggttggtacaaacgtcccctcaaatgtgggatgttaaaanggaggagctggccttttttgggaanggcacc

SEQ ID NO: 59203 - DNA, 387 bp, Homo Sapiens
  misc_feature (368)..(368): n is a, c, g, or t
tatacggctgcgagaagacgacagaagggtcattgtgatttagttgtttggtgaattgctcgtactttcaagggtcatcggtagcataactgcaccttggtgcttggagaaagcagagtgcagcagctgggccagcccaggactctctgtgcctggagctcctggtaatggacctgccagcgtgtgaactgacgtgcccagcgctcccacggtgggaagctgtttactctctcccgggaggacacagggttagacatagttgaatctataatcattatcaaccagatcaacacgttctaactgacttgcttgtgtcgtttttttccccaacagtagttcaatggcctgtgaatgttttgcttccacanaaaaaaaaaaaaaaaaaaa

SEQ ID NO: 59204 - DNA, 573 bp, Homo Sapiens
  misc_feature (498)..(498): n is a, c, g, or t
  misc_feature (506)..(506): n is a, c, g, or t
  misc_feature (515)..(515): n is a, c, g, or t
  misc_feature (522)..(522): n is a, c, g, or t
  misc_feature (532)..(532): n is a, c, g, or t
  misc_feature (558)..(558): n is a, c, g, or t
  misc_feature (573)..(573): n is a, c, g, or t
aacgataccacttcccagatttcaacaagtgtgacaaggcatttaaatcaaatcttttgtggggcagggattaaggaccacagctgcaccacagtcctgggctgactcatggccagtcaccacgtctctgcagccttttcacagaagtacaaaagtgttttctttgtggagacaggacttaatttgatgcatttcaaccctgtctaaattcccctctttatgggccagacagatatactgtcaaacaaattccaagtaagccaaacagaggctgagagaatttgtcagtggagaaaggcaagtttcacttattcttgatagactgagttccagatgggcagcagtgcctcagtaggtagagtgcccagcaaaggggcagaccctgcaccccactaagcactttctggggacctggcagcttgttcttaacctggaaaataagtccatgaagtcggcattattatcctcactttaccaaggaggaaagccagggttcanaggagatntccacttgncaatggncacttagccnggaatggacccaactgcttcatactnttccatgattttacn

SEQ ID NO: 59205 - DNA, 568 bp, Homo Sapiens
  misc_feature (438)..(438): n is a, c, g, or t
  misc_feature (458)..(458): n is a, c, g, or t
  misc_feature (490)..(490): n is a, c, g, or t
  misc_feature (516)..(516): n is a, c, g, or t
  misc_feature (564)..(564): n is a, c, g, or t
  misc_feature (567)..(567): n is a, c, g, or t
aaggcagtattgagtaggaagtttacattggagtctctccctcaagagttaggtcttcataggtactgaacacttacaccaatcacctccattactcagctcctaagcagagatggaagcctcctaggtggaatgttgaatttgattttgaattctctcttcaacattttcagcataaaattcttttccactcctagataatatgccttttctatcttctcttctctgtaaaacacttggctttgagatcctgagaggtcttacttagttgtgggtctttgattatctcaggttttctgggcatcttgttaaatgaagattctggtccaacaggtctggggtggggcctaaaattatgcatttctgacaagtccccaggggaagtctatggggctggcctagggtccacactcggaataggaaggtctaaagaaatcngcattgtaaaaggaaaaatnaacattttgaggcttaatggcagcagcattgngggctgataatacctggcagacaaantatctcagcatcaattcttggtcctaggagttgaagcccccaagttgnttnc

SEQ ID NO: 59206 - DNA, 1051 bp, Homo Sapiens
actaaaggcaaacaaggactctctgtataaggttccctctcccagcctgtgctgactcagccatcttcccattctgcatcttctggagcatcagtcggactcacctgcatgctgagcagtggcttcagtgttggggacttctggataaggtggtaccaacaaaagccagggaaccctccccggtatctcctgtactaccactcagactccaataagggccaaggctctggagttcccagccgcttctctggatccaacgatgcatcagccaatgcagggattctgcgtatctctgggctccagcctgaggatgaggctgactattactgtggtacatggcacagcaactctaagactcacacagtgctccagacccatgaggaagtaagacaaaaccctcccctctactctcctggcctagtgaaatcacccctgctggtggctctgaccaaatctagctcaaggggtgacatctgttgtctcatcgacagcactggagctcccacggagaagtaggtctaacaaaatcctaccttgctcgcatttcacaggcagacatccgttgctcaggggtaaaatctctcagtgttgacattgaagaaggcaagagggctgggttggggttcatctcagctcagagtctagaagtgactcagagatgctgctggtctcaaactcccaacctcaagtgatccactcacctcagcctcccaaagtgctgggatgacaggcgtgagccacagtgcccggcctagtacattgtttaaatggtgcatgtaaaacctcatggtactacaactgcctggtgacagactcaccagagtaaataactatcctgctgttctccaaccacatgggattccccaaacaaagatttgttgagtccaagatgcatcatgccagaactcttgcagtcatacacataatttgtttcattttaataaatacggttatctttttttcttcaaaaaaaaaaaaaaaaaaaaaaaaaaaaaaaaaaaaaaaaaaaaaaaaaaaaaaaaaaaaaaaaaaaaaaaaaaaaaaaaaaaaa

SEQ ID NO: 59207 - DNA, 2509 bp, Homo Sapiens
ttttgtttgctttgaaagttcttaacaaccattattgccctggaggctttgtcaacattttgggctttcctgtaccgaacagatttgcttgttgggtcgaacttgtggctattcatttattctcaccagggacttccttcgctgggcatctggctgggattcttgttggactaatgtacactcaagggcctctgaagaaaatcatggaagcatgtgcaggcggtttttcctccagtgttggttacccaggacggcaatactactttaatagttcaggcagctctggatatcaggattattatccgcatggcaggcccgatcactatgaagaagcacccaggaactatgacacgtacacagcaggactgagtgaagaagaacagctcgagagagcattacaagccagcctctgggaccgagtgccttgtcagtctcctctgctctggaagaattctgatatgacatagaaactgctagatgctggcaaataactcctgggtttcgggccatctagacaataaacaactccataatattcaatgcagcagcctctgtagcgcccatctgtttcaaaataaccctaattctgcttacgatgcggaatgctttgttgactggaatttgtcctagttttcttcagcagatttaatgtcataggcctctggttccacctgctggcagagataaataccagaatgaaactcgggtggatatgttcagttgcaagaaaaatccgagctgtagctcaatggttctcaaaggctgatgtacatcggagtcacccgggagctcattaaaactacagcggcctgggctctgtgggaagcccacccaatcagcaactatttcttaaacagccctcctggtgattcacacacccacaccaacgttagcagacgccactacacctggaatgaggggtgcagaacccagcaaggttagggatgattccagaccactatatcctactcatgcccaagagtgacaaagccaccttgagatgcccactcctacctcttccagtttatccaggtaactcttagtggcaaaggccaaagctttattcccttggaactcattttaaaaagaaaaagttcaaagtggagaaaactgatgaaagcactacttatctaagtggtcaaggttaatgtcaccagtgataagtcatgttgacagcacgttgatatgtgatgagggcatttcacctctgtggtattcttcaccaaaacccataaccccagtctaaccatgaggacaaatagcagacaaaccagaccgaatgaaattcttcacgatatctgtctgctaccactcaagactgtcaaggtcatgggggtcaagaaaggactcagaaagagccacagaccaaaagagactaaggagacttggtaacaaaatgtactgtggtctccaggattggaccccgaacagaaaaaggaaattagtgaaaaaaactggtgagatctaaatgtctggaatttagttcagaggaatgtatcaatgttggtttcttagtttcgacaaatgcactgtaagatgttaacatttagggaatagacttgtctgcagtatctttgcaacttttacgtaaatttaaaattattccaaaataaaaagtttattaaaaaaatttacaagaaaaaaataaccccatcaaaaagcaggtaaaggatatgaacagatgcttctcaaaaggaagacatttatgtggccaagaagcatatgaaaaaaagctcatcatcactggtcattagagaaatgcaaatcaaaaccacaatgagataccatctcatgccagttagaatagcgatcactaaaaagtcaggaaacaacagatgctggagaggatgtggaaaatgggaatgcttgtgcactgttggtgggagtgtaaattagttcaaccattgtggaagatagtgtggcgattcctcaaggatctagaactggaaataccatttgactcagcaatccattactgggtatatacccaaaggactataaatcattctgctataaagacacatgcacgtgtgtgcttattgtagcactattcataatagcagacttggggccaacccaaatgcccatcagtgatcgactggataaagaaaatgtggcacatgtacaccatggaatactatgcagccataaaaaggaatgagttcatgtcctttgcagggacatggatgaagctggaaaccatcattctcagcacagtaacacaggaacagaaaaccaacaccgcatgttctcgctcataagtgggagttgaacatgagaacacatggacacagagaggggaacatcacagaccagggcctgttgggggctgggggcaaggggaggcatagcattaggacaatacccatgcatctggggcttataacgagatgacaggttgatgggtgcagcaaccaccatggcacacatatacctatgtaacaaacctgcatgttctgcacacgtatcccagaacttaaagtataaaaaaaaaaaaaaaaaaaaaaaa

SEQ ID NO: 59208 - DNA, 1054 bp, Homo Sapiens
gtgaaccggcccccagggctggctcgggatgttggcaggagcagggcatcaggctcagcccacgctccccggctccaggaacgccgacctgtccatcacgctgggtacatcgctgcagatccggcccagcgggaacctgccgctggctaccaagcgccggggaggccgcctggtcatcgtcaacctgcagcccaccaagcacgtaggtgtctgagcctacccctgcccagggccaccatgcaccctctgtcccccacgcctgacccgtcccgccccccggcaggaccgccatgctgacctccgcacccatgtgagcatcgtcgggctcattgcagcagcagtgttggttgaatagaataagtcatttttgccttcgtgtgaattcatctctctctctctgcctctccctctctctgtctctctccaattctgtctctgacttgctttgtctttaactctttatctctctgtctgtgtcttgttctatccccctctccctgttcttgcaactcaccctatatttctgtttctgattccctctctctgtctccctgtctctctctgtctcctgattttctctctctccaactttctctctatacctctctgattctccctctgtctctttttctgttcccctctccccgtccatctctcccggcctgccaccttcaggggtccccacggagtctggaccatggaggagcgaggtctggcccccaagttcgacaccacctttgagagcgcgcggcccacgcagacccacatggcgctggtgcagctggagcgcgtgggcctcctccgcttcctggtcagccagaacgtggacgggctccatgtgcgctcaggcctcccttctgggccccctacagcccaccctacccctcctccatgggccctgcaggaggggagacccaccttgaagtgggggatcagtagaggcttgcactgcctttggggctggagggagacgtgggtccaccaggcttctggaaaagtcctcaatgcaataaaaacaatttctttcttgcaaaaaaaaaaaaaaaaaaaaaaa

SEQ ID NO: 59209 - DNA, 1681 bp, Homo Sapiens
gcgggtaggcatggcggcgcaccttaagaagcgggtttatgaggaattcacgaaagtggttcagccacaggaggaaattgctactaagaaactccgactaacaaaaccaagtaaatctgcagcactccacatagatctgtgtaaagctacctccccagcagatgctttgcaatacttgctccagtttgccaggaagcctgtcgaggcggaaagcgtagagggagtagtcaggattctcttggaacattattacaagagatggagtctctctgtgttgcccaggctggtcgcgaattcctgagctcaagcaaccctcctgcttggccctcccaaaggattgggattacagacgagaatgatccatctgtgagactgaaaattgcatcattgttgggtttattatcaaagacagcaggattttcaccagactgcattatggatgatgccatcaacatcctgcagaatgaaatctcatcaagtcctagctcaactgctggatactttgcttgcaattggcactaagctaccagagaatcaagctatccaaatgcgattagttgatgtggcctgcaaggtaagagtataaaatctattcagatccatcctaaactggtaactgaggactgctaaggaccattaatggttttaggagctgccttatttttttcatctcttggtgttggattaggaataaagttaagtacacttgttataaagtgtatttcgtcatcctttcaaaacaaatgaaaataattacagtacatagttactgtgtatattgtgcctaataatgcactctgcttgttatggtgctttgtattcagtttttcatttggtcctcacaatccttcaagtaagtaccgttatttctcttttacaaaggtgaaaattaagatttatggagtctgatttgtctaagtttgcacagctaggaggttgcagtaccagggtataaactgtattttttctgaccccaaacttgttttgtttttattatgccttgttgcttcaataaacagaccaactatacacaagtaaatgtatgggaaaagttttgtacgttctttttttctgatttttaaatacatgtattaatacattaattgtgccttttgatttaatttggaggttaattagcctctttgtgtatacacagcaacccctagaaccctgtagaattgattttactttggatctttttgataactttgagaatataaaaaagtcaaatgcatttgaattgtgttagagtattatattcttgaaattagaaagctatctcagagatgcaggaaagattacttgatttatcttaaaacaacaggcatacataaaaccaaaaacactttgacaagtacaatactaaaagcttaaatagggccaggtgcggtggctcacacctataatcccagcactttgggaggcagaggtgggcggatcatttgacatcaggagtttgaaaccagcctgaccaacatggtgaaaccccatctctactaaaaatacaaaaaaaattagccgggcacggtgatgcctgcctgtaatcccagctactagggaggctgaggcaggagaatcgcttgaacctgcaagacggaggttatgtgagtggagattgagccactgcactccagtctgggtgatagagtgagactctgtcttttaaaaaaaaaaaaaaaaa

SEQ ID NO: 59210 - DNA, 2028 bp, Homo Sapiens
ccgccctgacgttacccggatcggagaggttggaattcagattacggctgcgattcgggtgtctcggaccccggtgtgcaccggaccacggggaggcggctccaaaggcgcggtgaacgttggtgagggagggcagctctgcgcagccccaagacatggctcacaacaagatcccgccgcggtggctgaactgtccccggcgcggccagccggtggcaggaagattcttacctctgaagacaatgttaggaccaagatatgatagtcaagttgctgaagaaaatcggttccatcccagcatgctctcaaattacctaaagagcctaaaggttaaaatgggcttgttggtggacctgacaaatacttcaaggttctatgaccgaaatgacatagaaaaagaaggaatcaaatatataaaacttcagtgtaaaggacatggtgagtgccctaccactgagaatactgagacctttattcgtctgtgtgagcggtttaatgaaagaaatccacctgaacttataggtgttcattgtactcatggcttcaatcgcactggtttcctcatatgtgcctttttggtggagaaaatggattggagtatcgaagcagcagttgctacttttgcccaagccagaccaccaggaatctacaagggtgattatttgaaggaactttttcgtcggtatggtgacatagaggaagcaccacccccacctctattgccagattggtgttttgaggatgatgaagacgaagatgaggatgaggatggaaagaaggaatcagaacccgggtcaagtgcttcttttggcaaaaggagaaaagaacggttaaaactgggcgctattttcttggaaggtgttactgttaaaggtgtaactcaagtaacaacacaaccaaagttaggagaggtacagcagaagtgtcatcaattctgtggctgggaagggtctggattccctggagcacagcctgtttccatggacaagcaaaatattaaacttttagacctgaagccatacaaagtaagctggaaagcagatggtactcggtacatgatgttgattgatggcacaaatgaagtttttatgattgatagagacaattcagtatttcatgtttcaaatctggaatttccatttcgtaaagatcttcgtatgcatttatcaaatactctcttggatggcgagatgattattgacagagtaaatggacaggctgttcctagatatttgatatatgacataattaaattcaattcacagcccgttggagattgtgattttaatgttcgtctgcagtgtatagaacgagaaattataagtcctcgacacgaaaaaatgaagactgggctcattgacaaaacacaggaaccatttagcgtcagaaataagccgttttttgacatctgtacttcaagaaagctacttgaaggaaattttgccaaagaagtgagccatgaaatggatggacttatttttcagcctactggaaaatacaaacctggtcgatgtgatgatattttgaaatggaagcctcccagtctgaattctgtggattttcgtctaaaaataacaagaatgggaggagaagggttacttcctcagaatgttggcctcctgtatgttggaggttatgaaagaccctttgcacaaatcaaggtatgtttgttcattttcagtgtacttttcctggatgttctcttatctggaatccatcaaaaccttgctaataataatcaacatataaaaatatcgtgttccagcactttgggaggctaagacaggtggatcacttgagcccaggaggttgagaccatgctgggaaccctgtctctacaaaaagaaaaattttttgtcattagccaagttcagtggcatgtgcctatagtcccagctactctggaggctgaggtgggaagatcacttaagccccatgagtttgaggctgcagtgagccgtgatcacaccactgtactccagcctgggtgacagagtgagaccctgtctcaaaaaaaaaactcgtgcc

SEQ ID NO: 59211 - DNA, 1231 bp, Homo Sapiens
caaagaggaaatggaggttttgcctgagccccctcctccaataaataggaaaaaagacaagagctatgctacagctatgggaccctttcttaggcaagaggcattaagtggggagctcttagcctgcctggtaatacaagattgacagggcaattgggtatataaacccatttcttttaacatttataaaaagttaagaaaaagcattagaggctgaaaccgcgtggccaaatgggtggtaggcagaaggaaatacttggcagcaaaggaagctcgcagacctggagccagcaagtgcttccaggaactcagcctgcacagaggcagcagtgacaaggagccaggcgcagcacaccagagctggcctgatagggaggggcaggaggcgtgcacgaaggtccgcccagcggcagcagggtgagggagcagcacagacaaaaggtggcacagacaaaaagcagcgcctgagcaagcgcaacatgaccgccgccccgggacccgccggctagactctcttggctccgcgggtggcccatgggcaaaatttcatgtgttccttgtatacaagcgacatcccagattataattctctgctaagatttaagtacaatttaagaatttaaaacacctctttctaataatggccactgttgcttttacactattcccctggcaaagcaagacagaaaaatttgcatttacaataccagctatcaatattgaaaggtcagcttgccgatttcattggaaagtgcttcctcaaggaatgctaaacagtgctgccatgtgtcagtatcatgtaaatcaagctttgttccccagtagaaaagaatttcctcattgcaaggttattcattttatggatgatattctactagcagccccagtggagccagtgcttttaagtttatatacctctgtcataaagaatgcacagctaagtggtttaatcattgcacctgaaaaagcacaaatgtcctctccttggaagtatcttgggtacatacttcctggtcagtaagacctcaaaaggttaaattaaatactagcaacttacacaccttaaatgattatcagaaattactaggtaattttaactggcttcaccccaccttgggcattcctacttataagctgcaaaacctgttttctatcttaaagggtaacacagccctggattctcccagatatttaacccctgcagccaaaaaaaaaaaaaaaaaaaaaaaaa

SEQ ID NO: 59212 - DNA, 1640 bp, Homo Sapiens
gggagggggcggcggccatggagcgggtgaacgacgcttcgtgcggcccgtctggctgctacacataccaggtgagcagacacagcacggagatgctgcacaacctgaaccagcagcgcaaaaacggcgggcgcttctgcgacgtgctcttgcgggtaggcgacgagagcttcccagcgcaccgcgccgtgctggccgcctgcagcgagtactttgagtcggtgttcagcgcccagttgggcgacggcggagctgcggacgggggtccggctgatgtagggggcgcgacggcagcaccaggcggcggggccgggggcagccgggagctggagatgcacactatcagctccaaggtatttggggacattctggacttcgcctacacttcccgcatcgtggtgcgcttggagagctttcccgaactcatgacggccgccaagttcctgctgatgaggtcggttatcgagatctgccaggaagtcatcaaacagtccaacgtacagatcctggtaccccctgcccgcgccgatataatgctctttcgcccccctgggacctcggacttgggcttccctttggacatgaccaacggggcagccttggcagccaacagcaatggcatcgccggcagcatgcagccagaggaggaggcagctcgggcggctggtgcagccattgcaggccaagcctctttgcctgtgttacctggggtggaccgcttgcccatggtggctggacccctatccccccaactgctgacttccccattccccagtgtggcatccagtgcccctcccctgactggcaagcgaggccggggccgcccaaggaaggccaacctgctggactcaatgtttgggtccccagggggcctgagggaggcaggcatccttccatgcggtctatgtggtaaggtgttcactgatgccaaccggctccggcagcacgaggcccagcacggtgtcaccagcctccagctgggctacatcgaccttcctcctccgaggctgggtgagaatgggctacccatctctgaagaccccgacggcccccgaaagaggagccggaccaggaagcaggtggcttgtgagatctgcggcaagatcttccgtgatgtgtatcatcttaaccggcacaagctgtcccactctggggagaagccctactcctgccctgtgtgtgggttgcggttcaagagaaaagaccgcatgtcctaccatgtgcggtcccatgatgggtccgtgggcaagccttacatctgccagagctgtgggaaaggcttctccaggtgaggaaaggccccctcttcctcccctgccacacgttatcttagtcctgaaaaggctcctgccaagatctgggggtgtgggatttgtgggggtcatttgaccttatagaaccatgccaggtttgggtagagtgtttttaagggcccttattttgagatggtatgcctgagacctgctttccattccctcagggaagtttttttgacgctaagtgtgccctactgtctctcctcctggggccggattcctcaggccagagccaccggacctcaccattcttcccccagggctccctttgtgtatccggcaccaggcgtggggccccctctgggggcgggagactgggctcct

SEQ ID NO: 59213 - DNA, 1989 bp, Homo Sapiens
gttttttttttggatgtggaagccgagacctaaagttggggggtgatctctgaggagatggatcggtacctgctgctggtgatctggggggaaggaaaattcccgtcggcggccagtagggaggcagaacatgggccagaggtgtcgtcgggtgagggtactgagaatcagccggacttcacagcagcaaatgtttatcacctcttgaaaagaagcattagtgcttcaattaatccagaagatagtactttccctgcctgttcagtgggaggtatacctggttccaagaagtggttctttgcagtgcaggcaatatatggattttatcagttttgtagttctgattggcaagagatacattttgatacagaaaaagataaaattgaagatgttcttcaaacgaatatcgaagaatgtttgggtgctgttgagtgttttgaagaagaagacagtaatagcagggaatcattatccttggctgagtatgcttatatggtttttgtattatcattaaaatacttaatattagacagttattttaatccatgagaatgaagattatatattttagcatctttactgaagaaactctagttaattgaaatttttgactctcaatttgggccttttatttgaataaaattctttaaaatgcatgtttcttaagcttacataatgtcaagaatcataaaaagtgatattttaataaacatgttcctttcttgaagataaattctgcctaatattttattttatttttgaaacagggtcttgctgtgtcacccaggctgcagtgcagtggtgcagtcacggcttgctacagcctagacctgggctcaagcgatcctccgacctcggcttccagagtagctggaactgcaggtgtgcaccaccacacccagctaatttttgtatttttttttgtagaaatatcatttcgccatgttgttcaggctgacctcgaattcctgagctcaagcaatctgcctgccttggcctcccaaactgctgggagtacagctgtgagccaccgtgcctggccaataatgtattttaaaagcttgaatagaaatgttatttaatgttaatagctagcattcataccaaagtatcattttcattttgctatttgaggctgaaatatgtgacttctttaatttatgtgtatttgcagcatttcaggtaccttttaaaatccatagagtttgtgaggattatatgtacatgattgagttcacttttaggtttttttcaattgtggtacaatatgtaagttgatccaggtgacataagttgtgataataatttttctcttgatgaaatatcccacctcttatagttaataccttttattttagtctttcataacatttcatgacaaaactgctcttattttagtattcacatattatatctgtaagtagctgtagacttaaaaattttcattttcctttttccagatcatatttgtttgtactgattaataaaaggagacctttccaaaccagagaaatatcattgaaccagggattagtagaggtaactttatttacacaatcttaggccagtcacgtaacttctctggtcgtttgttttctcatccataaagtattgaagtacttttagataatttcttaggtgctttcatttacccttaaaaactcttatcatcccatatgttttcctaccactgttaaagacaagtatagccaggcacagtggctcacgcctgtagtcccggcactttgggaggccgaggcgggtgggtcgcaaggtcaggagttcgagaccagcctggctaacatggtgaaaccccttttctactgaaaatagaaaaaaattagccgggcgtggtggcaggtgtctgtagtctcagctactcgggagcctgaggctggagaatcgcttgaacccgggaggcggaggttgcagtgagctgagattctgccactgtactccagcctgagcgacagagcaacactccgtctc

SEQ ID NO: 59214 - DNA, 2839 bp, Homo Sapiens
tacagagttaggttcctacaagcctctggtcacaacattttatctactgattaatatataaccacgtattatgtgtgtttctgtttaaagattcctcatttaatatatattgttgattcactaacattaagttcatggtcaacatcactctaactcatacctgaaccaagcttatctaatgtgcatatttttccccataaggcctttttgcacttaggaatgccagacagcactttggcactacatttgggggccattttaaacagtgaagccaccaaaaacacaaaaatgtggcaccaaacagatggtgaaagggctgttgtggatagtaagagctgaaactagaaagcagcagagatcacagagttcagcttcagctggggacgtgtgcatatggtaactcaaatattttgccactttgcacatgtctgcaatgaccacagaaataccacaagtattggtttgggggttacacatgaattttagcaaacaggcaaattcacaaatatggaatctgtaaatgatcaagatcaactgtatatacgcatgcatacactcatataaatatataggtttgtatgggctgttttaatttattatataatgtaaaaacattctgcagcatagtttttttaagttaatgatgtggcttgtagacgtttttatgaagctacactagatcagttgtattcttatgaagtgatacataattattcataatagggatctaccataatttaaccattcgtctaatgatagtgtaagtttcaatttcctcataggtaaatagtaaataaaaataaaagatgtgcctttgagagttaaatgagcttagtacattgccctacaacttaagcacttaatgagtgtgagttaataaaaattaaagggctttggagtcagacagacatgggttccacattccatctcttccctccctagctgtgagacttcactgaattactgaatctctttctgtgtaaaagaggtagatgaagaacaaaaatagtaataaccttaagattattgaatctctctaagtcatctcatctgaaactggagattataatacttcattgtttgtgtgacaatgaaatgtaatcatacctaaagtacctaccacacaggaactcagtgttttttccttcttagataatttgatctcaagaaaatggtgttactttataaagagtagcattacagaatcaatatcttcttttaaaaatataacacagcattgtacttctacatactcagaacgtaagagaaagaactaagccattttagtacagtgcttagactgtatactttcagtgaggtatagtctacaaacaaaagcaaagaaatgttgagtttggttggtagtggtacatatatagcaaatctagaactcttatgtattttaagttgagcaaatgagtacatatgatgttgctgggagtcagggttttcttggtggaagaaaggagatatggaatggaataagagaaggaagaatcctctggggctttaagaaattagaattaacaataaaagcatgaactataatagtgtaaaacaatgtatgcatatgataggcatatatgcataggcctagaaacaatgacaccctggcaattagcacagctgttcttgtttggtttttaaataatagtcacagctaaaagaaagtaggactccagagctgtgtaaagatgaatttggatatataccagaaagtaaggaagtaccccaaaattaatgggtacatttcaaaaagacacagaagccagctcaaaaaggctctcactggtcaaatctaggacaatatgagtatcagaatgaatgatgacagtaatgagtataacattgagcaagagaagaatccctgagtacacagtgatgcgaacaaataagtaaaatgggaggaggggaagaaacagctcttctttacaatagaatgtcaacaactgtagaaggagtcatagagtcagaaaatcaccatcatataactgataattgtttcagcaagaatcatcaatgattgctaaattattggatgcagggctgtgggagaacaggatatttacacagtctcaaactatctccctatcaatagtttattaattacaaaggtagaaaagaacacctttaccttggagaaacttggcatataccaacttaagtagatgatcaaagttaacatcatcagtattgggataaactgataccacatgccttctgaggtgatgcactgaggacacacaatatcacttctgtagcattcttgccaaaactgcataaactgaatctgatcatgaagaaacaatcaggcaacccaaattcaacacattccactcataagtgttctgtactcttcaaaaatattcattaaagtcaaagagaggctgaggaactatttcaaactcaggagacttggaaactaaatgcagtgtgtgatcttggattggattttagattagtaggaaacatgactgtaaaaaagtgactgaaaaataactggtattattgggacatcaatgttaaatttcatgaatttaatatatattggttatgtaagttaatgttcttgttctgagctgaaattagtttgagcctatagggggcaaagctgtctaaaactcccaaatagttctgcaaaaagattttcagtggggtacacacatggagagagacagagagagagagagagagagaacatatttgatgaaacattaattgatgagatgaatctaagtgaaggctatatggggtgttcattgcacaattcttgaaacttttctgtgggtttgaaatttttcaaaataaaaagttgaaaaagaagcaatttggaaatttc

SEQ ID NO: 59215 - DNA, 1505 bp, Homo Sapiens
ttctgactatggctgtttccttctctggggaaagcccacatccccctctatcccaaaggtgatggtgggaaggaaaggagaaatgtagccaaaatggtttgcagttctcagaccaaagccggttttcgtcagtatgcacaaaagcacgtgagcctttctttctcttccctgttgtgccctgagactgaccttgacaatgttcatccctcagctgcctgccttaggactgacttccttgatgatggccatttccttgaatgtgtctgtttctcagggtctgtcctctgcatgcatgcatttgcgcatgcaggcatgcaaacccacaagagtccaggctaaagttttgggggattgggtacaggaaaatcatgtcattgagaatggggcaaccctgaggccatggcaggatcccctgcatgacaaatatagaatgaagtaaaaataatcagaggaagccgggccattgatgatgctatcagtcttagtggggtgatacaccagacattctgtctcatttctcttcaaacgaccgcatgagtggtcatggaaactacaagtcacacctctccgtatttggaaaagcagatcgtttctctgacataggagtaataagctttcttgacattttgatagcagtgagggaagggaaaaaaggcagggaggagttggaggtggggtgaggggtagaagccgtcatgtgtcctagagctctctgtaccagcgttctggtcaactgtacagtattttcttcccactcctcaggcatagcttgggaaccaggaacagcagaacccaagtggtctggcaaagtgtttgaatggtgctctgtcacctagtgccaaaagcagattgctacactgaagggagaaaggctcttaaaagagaccattggtttaatctcactgggatggtcagttcctcttggccttcctgtttgctccgtgttgcgaacactagtttcaggggggtcaggctcccgatctgcgtcattatcctgtttaaatagggaggggcaggccctttcctgctgtctgtctcccatagtctctggctatgaggcttgagtgacttggacatgacatttctctttctggttcattcattttccccacttccatctgaaaattctaaccaaatgtcttgctgaattctctaagtacaacaatttcaccctccctgcagacaatgaggaaatcagagtccagaatccatttcaacttagcaaacatttactgagtctatattttgtttcggatactggggtaaagttctggaaatgcaaaaggaatttgcatctctgaacttaaggagttcacagtcttgaacagggcaatccaagttgtactgtaaagaaatagtatgatcgagaactgggaaaggaaacagcctttgaatagatacccattctggttaaatggaagatgggtttcgagggaggaaggaatttaatgcaggaaagccaattgggaagcaatttctgtgctacagaaaaaaaaaaaaaaaaa

SEQ ID NO: 59216 - DNA, 2925 bp, Homo Sapiens
gaacattttaaacagtgaaatagatttgtgcatttagaagcattgctttggttataccataggggatggattggtgaagatgagaagagagtttgggagtaacagaaaaccctcaaggtctcagatgggtggcctgactatagtgttggcactgagattgaaaagcagaaaaagttattaggactaatcttttggcatattttaccttatagaatagaggttggcaagttttttgtaaagagccataatattttttaaaagcctaaatactagggctttgagggccattctgcttgtattgcagctattcacctgtgtcttgagcgcaaaagcagccatagactgtaggcaaacaaatgagtgtggttgtattctaataaagctttatttatgaaatcagttgggggtctagattttgctcacaggcccttctaggctagcgtatccagtggtgaagattaatagctcaagcaatggctagagtaagatgataatataggtgagggattgtagggataagaaggaaagaggagcaggggaggaaagaaccctgaggaaccaaatcatattaggagacgaggtgaaaatggtactgagggagtctgtaggaagcttagcaggaaaatggtgtataagaacttagggaggagagtttcctgaaggaggggcagtaattgcagtatcaaatgctacagagaggagaggcatgatgagaccttacaataagccattcattgtatttgctctttgggggccagtgagaagggaaaactgagggtggtggaggctggaagctagatcatgatgagctaaggagtgagttggagttgagctatttagactagttagagctttgatttaaatatttggtagtcatgggaaggaggaatcacaggttagcttgaggaagacgtagggtggaaagaaggctgttcatttgttttttatttgttaagaagggtggtgttgactaggctaaactgaagaagccagagcaaaagagacctgaggacttggttagaaaaggaacaaacgactgagcctagatagagtaagtagggagttgttggggaagggaataagaaatataagagatgtgtgagatgtggagagatcttgaagcagcctcaggtggaaaggacttgaagtacaggcagaaatgaggatgggctgcattaggggtagggaaactggaacaaattatacttagtggcctctattttctttgacaacgttaactatagagaatgaagggtctaagaggtaatacttgaaggaaaggtgtttcagggtaagcaaaataggatttatataggaatgaaggcccagctgaggtaagtactgtactagattgttattttggtaacagtaatgaacaattttcagttaattatataagatttagctatgaatgcattctggattttagttagaattgttaaaccaaattcaaagtgtggaagtcattcagttgaattgttaaaaaaaaaaaatggaactagcaggaacgttggaatttaatgagtccaactcctttttcacagatgtgaaaatttaaggcgtagaaaaataatgaatgttgtccactcatctagttggtaaccaggttttctgatttcagaaaatcaaaaatcacttgtttttaattatgtgttttatcataacacacttaacaaaaattctggctgggcacagtggctcacacctgtaatcccagcactttggaagacagaggagggaggattgcttgagactaggagttcaagaccagcctaggcaatacagtgagacctcatctctacacaaaatttaaaaagtaggcaagcatggtggttcacaaccgtagtcccagcttgggaggctgaggtgggaggatctctttagtccatgaggtggaggccacagtgagctgagattgtactgtctcagaaaaaacaacaacaaaaaaacaaaagctctcttttataaaactttcaaacatatgtaaaagtagagagaataatatattgaactcccatgtggcattttaaaacaattataatttatggtcgtttgtgtaatttatatcttgttaaaagaaagtccttagtcaaattaaagagttcaactgagcaaagaatgattcgtgaatagggcagcctcctgagccacagtatgttcagagagactccagcacagccaggtggtggaagaagatgtatagacagaggtacagaaacagtcagattggttacagctcggcatttgccttatttgaacatggtttgaacagttggccccttttaactggccaaaacttggtgattggcacaaaagtaggttacagtctgtttacacctccatttagatacatttatagttcactatgtacagagaaacctttagactgaacttcaaatatgtaaggagactgctttagactaaacttgatttaacaatctctacccacttctactcttccctgcattattttgaagcgtcatctatcagtattatgtttcatctgccaaaattttaacatgtatgcctaaaaggtaagacatatggtagtttcagtgttttttctccttttaaaacataaaccacaatatgggttaatgtggattatgtgggctaagcaggttgatgtgggttaatgtgggttatgtgggctaagcaggttgatgtggttaatttttaacttccaaagatgtttataagttattatgagtagactttttggaataaaggtttcctcatattgcagtattttggaaagtgattttactaaaaaataatacgggccaggcatgtggctcatgcccgtaatctcagcactttgagaggcctaggtgggaggactgcttgaagccaggagttctagaccagcctgggcaacaaagtgagaccctacctctacaaaaaatacaaaaaaaaaaaaaaaaa

SEQ ID NO: 59217 - DNA, 1174 bp, Homo Sapiens
tgaatgactaaattattattatcttcctttttttcccttctgatataccaattttattaggtgatatctccgaaaaacccaattttgttaggtgatctcataaaaaaaaaaaacccagcattgactgaggttgttcaaagtaaagttattttatttttatttatttatttattttgagacagagtttcgctcttgttgtccaggctggagtgcaatggcgcaatctcagctcactgcaacctccacctcctgggttcaagcaattatcctttctcagcctcccgagtagctgggattacaggtgcatgccaccatgcccggctaatttttgtatttttagtagatacggggtttcatcattttggtcaggctggtcttgaactcctgacctggggtgatccgcctgcctcagcctcccaaagtgctgggattacaggcatgagccactgcgccggcaaagtaaagtaatttaaatagtgcctctttaacatgacacacagtaaagtaatttaaatagtacctctttaacatgacacacattataaggacttgttatatcccttctctttctggggaataatttttggaaaacttactgccttgtatttgggcatatatgacatgtgggttgggaccccaggatcatggtttccaactctcttgtccctgttgtttcaagcacataaactgaattcacagtcctatccaggacccttggagaagattttcctgcaggagcatttgagctaagagactggctggctggagggtaaattcatcagtactgctgagatcatcatcgtatatgccctgaaggagtggagtacagtggttgagttggggctctggagtcagagatacctgtatttatccattttgttgacttccctgtctccagtacctagaacagtgcctgccacatatcagacactcaggacatatttgtgaatgagtgaatcttagtgtactgggagattcttctaatcatcctgtggttaatatgaagatcattgtctgatttgtagtccctctccttactgaaacattagcggaggctttatttttatagtaaatggagtatttaggctttttttttattttattttgattttagtttttagtttttttgacattatttactttgcgggccgaaagcaaaaaaaaaaaaaaaaaa

SEQ ID NO: 59218 - DNA, 1834 bp, Homo Sapiens
tttttttttttttttttcaagataaccaagatgtactaaaagaaacagtattttttatacagctagagagcaaggactcctggtataaaaggaaaggaatccttccctttcctttccttgggagtacttgttaactgggtctgctcagcaaactttagaagcaagcgtgtttttaaataaataagtctgagaagtaaaaagcaccactggaccactacacagaagtgcacagcagtttcctacaacagagcaagcacaattaaaatatgcctaatcgcagggatgcacaatgctcaatacaacgcccccaaaaccaaatggctaaagatatatgcacttccagaaaaatattggttttactcaaaaacaatttctattgcaaaactgcccttgaattacatgagctttgatttatgggaggtttttaaaatatattgcggacataaaatgggacttccccataaggaaaaaataaataaaactggaaataacagtagtaaataaaatgcatgcctttaaggctatcctgctgactagagatggatcacagttttggccatgagcttcccagcagtaaacataaagaggaaaactcaatcatatacatgatttgctagtatcaaaggctaacgaagtgttagagacaagtacaactttctctggaataaagaccagagagaaataattcttctgagtcttaaaagaaagatgtatttccatgaacagcatcctaaatactaccttcacaataaacatgtgacttttatgaggttacttcttaaaacagtcttaaatttaagtcattgtcatagctgtgtgctaaatgagcggagtcaatttacgaaaggaagaaaacgaaacaagtcagtgaagaaaagcagttctctagcaatggaaataactgaaagctaaaactgaaaggacattaagaaatgaatagaagaaagaaggaatcgtgacatcaaagtaaattatctgacaaatacatggaatccagatatttgatgtcgcatttgatgatgtaactgatgcaggagtaccggtgacattgcttcctaagagctgaggaacccaaccaagagagaagcttgaagagaaggctcttcaccccgcagaggagccataagtatctgcctgcaatcctgagattctgcagcacagatgctgacttttgttaactttcatctgcaaaacttatgaagcagaagttagaaaatattattgttagtaataacacattgctgacgaagcaaccacagatcatctacattacccaaagaattacccatagaatttagaaatacttccaaatcccagcaagataactttggtggaacatgagggcgtatctcctatctccacatgtgccttagtaaattgttggtttattagcaaatacagtataagagaaattttctaaaataaacacttcggctttagatgaattgatatgacttctagctgtctttccatgcagaacaaattgatctagcaggactatcgcactattaaatcttacttttacagctgggcatggtggctcacacctgtaatccctgcactttgggtggccgaggcgggtggatcacctgaggtgaggagtttgagaccagcctggccaacatgatgaaaccccgtctctactaaaaacaaaaaaagtgagccgggtgtggtggcgggtgcatgtaatcccaattactcagtaacctgaggcaggagaattgcttgaacccgggaggcggaggtcacagtgagccgagatcacaccactgcactccagcctgggcaacaagagagaaactccatctccaaaaaaaaaaaaaaaaaaaaaaaa

SEQ ID NO: 59219 - DNA, 386 bp, Homo Sapiens
gtattgatgctattacatggcataacggtctattatgtggtaggaaaatatagcctgctaaatcctacttagttgatccactttaaactgagtaactgtataaaacatctattgaaaattcttttccttttgacttatattctgccttacatcaatttttgcatttttggtatatatccttgaaatcggctatttcaattttatcagacttttaccagagtaaaacttgcttctgtagcaggcctctcattttttattatgaggtctgtttttaaatacttaatttgaacagctctaagatattgtcacttaggtcatctgctttagagatttgaacataagttcatttcctgttaatcaaagacattccgtaagttggctgttgg

SEQ ID NO: 59220 - DNA, 1564 bp, Homo Sapiens
gttttagcatactccctggcagagagaagtcagtcaataaatgtttgctaaataaagaatgatgtgatgtattaatggtattaatattaaagaaggtatatatcatcatacacatatgctcataaaataatgactcaaacttccaattctgtatgcagaagctaatcacctccattgttttttacttaaaaaagggagacatttttagtcttcacaataatcatgtatagattggggatgaaataatttaagtttcctactatatataaagccactgagcagtaacttttttatttcataaaaatcataatttttttaatcattaagtatccctttgtatccaccaccttttagaaagtctatttacctacacacctatcctctgagaattgtatgtcctgtatcattccccttccataaaaattgggcctgaaagccatgttttatgaacctttggcttcatcggccacagttgattagaccagaaagagatacctgcctcagactcaattttctcccagaggttcagaatgaaatcacagaaccatgagcgaatatatgaatttaagagttagaagacatgtccatccacgtgcagtggtgaaagacaacatgcaaagtaagaaaaatgaagtggaaaagcaggaagactcagagaaatcatgctaccccagggtagtaagaaaatagctgcatggggctgggcacggtggcctgtaatcccagcaagttggaaggacgaggcaggaggatcacttgaggccaggagttcgaggccagcctggacaacacggtgaaaccccatctctactaaaaatacaaaaatgagccagccatggtggcatgtgcctgtaatcccagctactcaggaggctgaggcaggagaatcacctgaacccgggaagcggaggatgctgtgagctgagatagcaccactgcactccagcctgggcgacagagtaagacgctgtctcaaaataaagaaagaaaaaaagaaaatagctgcctgggttataaatttccagttcctggtttcccttccccttcatgagtcttggctgtacttctatcatcgggtactgtgaaaactccagcatctttgcctaatgggaactaatttccctttttgggtaagccagcttacattttttaaattgtccattactggaacctatgatctgaagagcgtcctgggtcaactgggcatcactaaggtcttcagcaatggggctgacctctccggggtcacagaggaggcacccctgaagctctccaaggccgtgcataaggctgtgctgaccatcgacgagaaagggactgaagctgctggggccatgtttttagaggccatacccatgtctatcccccccgaggtcaagttcaacaaaccctttgtcttcttaatgattgaacaaaataccaagtctcccctcttcatgggaaaagtggtgaatcccacccaaaaataactgcctctcgctcctcaacccctcccctccatccctggccccctccctggatgacattaaagaagggttgagctggaaaaaaaaaaaaaaaaaaa

SEQ ID NO: 59221 - DNA, 557 bp, Homo Sapiens
  misc_feature (450)..(450): n is a, c, g, or t
  misc_feature (460)..(460): n is a, c, g, or t
  misc_feature (501)..(501): n is a, c, g, or t
  misc_feature (520)..(520): n is a, c, g, or t
  misc_feature (529)..(529): n is a, c, g, or t
  misc_feature (541)..(541): n is a, c, g, or t
  misc_feature (548)..(548): n is a, c, g, or t
  misc_feature (551)..(551): n is a, c, g, or t
aatgttatttatttatttatttatttgagatggagtcttgctctgttgcccaggccagagcgcagtggcgcggtctcggctcactgtaacctccacctcctgtgatctcctgacggtgaactcctgactttgtgatccacccgcctcggcctcctaaagtggtgggattacaagggagagccaccgcgcccggtctttttattttgttttttaaatgtttagtagagatgcagtctcgctatgttgtctaggctggtcctgaactcctgagctcaagctatcttcctccctcagccttccaaagtgttgggattacaggggtgagccaccgtgctcagctgctaaagacttttaaatcataaggaaaaggataactgcaggaacatcatcaggaactcagacgcctggcaaaggtaaaccacactgggttcttatgacagaaacccttcntgattccttnaccacccccaaatcttccctttggccagcaacctaagcttnaaaaaaagggactgccttnttactaccntgaagaaaggcnctttganccnggattt

SEQ ID NO: 59222 - DNA, 127145 bp, Homo Sapiens
gatcacaggtgtgagacaccacacccagccagaaattgaaccttggtgagagacactgagtggggaagggcagagactgggagttaggagttacagcatctgaaggccacatcctggagagatggccacagactcagccagtgaagaggaagtgctggggctggggccagaaccctgtctgtgtgacccctgagactgagctcagacacccctaaccctgaaggcacctctctttcaggaccaacagccaaaggcacagaagccactggcctgggagggactgtccctgggaatgaccctgctctctgagggctgggcatctggactccctctgctccagctcctctgtggttgtattcctccatttctattctaattagtcagtttccatggctggataccataaaatctcagtagaaggaagaacaggccaaccatcagagctgttcaatttcagaaaatctctttttgttgctggggacagagtctcactatgtcacccaggctggagtgcagtggcgcgatctcagctcactgaaacctctgcctcccgggttcaagcgattctcctgcctcagcctcctgagtagctgggattgcaggtgcatgccaccttgcctggctaatttttgtatttttagtagagatggggtttcaccatgttggccaggctggtctcaaactcctaacctcaggtgatccacccacctcagtctcccaaagtgtttggattacaggcgtcggccaccgcgcctggcccagaaaatctctttagtcgggacttgagaaagggactgggttccatctggtgggaatgggagggaggttcagtgtctgctgccagtgagacctgggtttgttccctcccccctggctgtgtgatggaggcaagacccttcattctttgagcctcagtgtcctgtctgtgaaacaggcaatgagcacatttatctcacagggtcccggtgaggcacattgggataacataggtgaagcccttaacacagttctgggcaaagcaatgtgacttctctcctccccagcggcacttgcaccacgtggggagaaactaggttaatacatccctgccacacataactaccaagtgcctgctgtgtgctggccacaacactaagagccttacatgtggtccttcatttaattttcaaagtgatgacgatgattctcagtgcacagatggagactctgagcccagagaggctaaataaactgctctcaaggacaccagcactttctgcaaagagccccagatcctaactaggacttacgttgcctgcgctgggaagagacccaaatgcctcccggctgtaggagtccctgattgcagacgtagggtctcagtccccgccccaagaagctgtaggtccagttgaagaagagacacacacaaggaaaaggaaattgaactgagaaggcaaagcgtgactgtggggcctctgctatatccagggtctccagagaaaggactagaagccactattccaattctgaggcctcagggaagcagcaagttcctgtgaggaaacaggatcccacaggtttcatcctcctcctgtcactcttctaggtggggagggagggctcccccacgtcccacataagcacacagaaaggagaggccagggcagcacaggctcagaacctgaaggacttggggacatcgccagccccatatccttgttttatacaccaggtagggcaggaactatggcaggtccacagaaaggggccggcagaagcacagccacgacgcaggccccctgggctgtccagtttctcccggacagaacatttcccttccctagcagcccccaacgtggagcactggatttggagtcaggagacctgtgtcttctgcaatcactctgagaccaactcctgtgtaatcgtgagtgagcgccttcccatctctgggcctcagcttccacctctctaaaatgagggggttggattccatccaatgttataagagccaaaggttatgagttggtagcgcccccaccattccgggtttctccaatctctccaggggcctcagagaccccagacagaagaggaacttggacagaggcttgggtgggggtggaggtggggattctgagccgtggatccaccctctgctgagtgccaggcctacaggcaggcaggcagagcaggcaagagccgtcccctacacaaagggaattggcccctcatggtgggacagaggccagaacccagctgggccctcaaccacccttctttcctccacaaccccctcccagggatggtggcatccgaagccagcctggcaagggaactggttgccacgtggggacttcccggagctgggggtgatgggaaacagggtgacgggaaacgtcctgaggttgcttcctccccttttgtttggatctcagactgacctgggaaccaactgggcagccatggggtattctgatggtggggagttggagggggagaagggacctgccccatcccctcaggctgctttgcaagttaaaatagctgtgaagatctatctcccagaattctaaaagctaaaataccttttgaaccaccaccagaccattatgcctggagtggaaggatgcttagaggaatcccttcttttttttgagatgaagtctcgctccatcacccaggctggagtgcagtggcgctatctcggctcactgcaacctccacttcccagggttcaagcaattctcctgctttagcctctcgattagctgggattacaggcgtgcaccaccacgcccggctaatttttctattttttagaagagacgagggttcaccatgttggccaggctggtctcgaactcatgaactcaaatgatccacccgcctcggcctcccaacacgctgggattacaggcgtgagccactgtgcccatctcgaatccctttttaaaacttcaggtatggctgggtgcggcggctcatgtctgtaatcccagcactatgggaggctgagtcgtgaagatcatttgagcccaggagttcaagaccagcctgggcaacataggagaactcgtctctattcaaaaaaataccaaaaaccaaaaaccaaaaaattgtaagtcatgacccactggtggatcttgaaattaattaagtcggtactctgagtaaatcagaatttttttttgagatggagtctcactctgtcacccaggctggagtgcagtggtgtgatcttggctcactgcaacctccacctcctgggatcaagcaattctcctgcctcagcctcccaagtaactgtgactacaggtgtactccgccatgcctggctaatattttgtattttagtacagacggggtttcaccatgttgcccaggctggtcttgaactcctgagctctggcaatctgcccacttcggcctcccaaactgctgggattataggcgtgagccaccgtgcctggccgcaaataaggatttaataatgacgatgataaaatagaagggaaaatctcagagcacatcctgggtagtaatagcaaactgtcttggctgtgtggtggctcatgcctctaatcccagcattttaggaggccaaggcaggaggactgcttgaggctaggagttaaaatcagcctaggcaacacagtgaggccccattcctacaaaaaaaaaaaaaaaaagaaagaaagaaaaaattagccgggtatggtggtgtgtgcctatagtcctagctactccagaggctgaggcgggaggattgcttgcgcccaggagttcaaggctgcagtgagccatgatcgtgccatggtacggcagcctgggtgacagagcaaggccccaactctgaaaaacaaaataaatacaataaaataaaatggtcaaaatggcctggtgcagtggctggtgcctgcaaccagagctacttgagaggctgaggcaggagaatcactggagcccaggaggttgaggcaccactgaactccagcctgggtgagagtgagatcctgtctctttaaaaaagaaaaaacaaaaaaagcaaactgtctcatgaaactcttgtttccatgttgcacgctctgccaggttgtgatgtaatgtatttcttactctgggtcacagtcacaaaaccttgaaatgtcactcactgtcttggctcatgcgtcgtaagcctttgttccccaacagggggaagtgaaccagcacacaaggcccttccgtcctgcggagctcactgccttcctcagctcctggcccgcacttccgaccacacactggggacacaccctcgggggggccccaccccagcagctgcccatgttcacacctcttcagttatttcaaactccgcctctctcggcctgatgcccaacacttccttcacccaaggaggtcctgttcaaatatcacttctggccaggcgcggtggctcaggtctataatcccagcacttcgggaggccccgaggcaggcagatcacctgaggtcaggagtttgagaccagcctggccaacaggtgaaaccccgtctctactaaaaatacaaaaattagccaggtgtggtggcacgtgcctgtagtcccagctactcaggaggctgaagcaggagaattgcttgaacctgggaagcggaggttgcagtgagccaagattgagccattgcactgcggcgtgggaggcagaggtagactctgtctcaaaaaaaaaaaaagtcactttctctgccagtcatatcttctgcaaccctgaggagccaggcaggacgacccctttaccctctgaatcaattggtctgtatcagggtctggcagagggaggggaagttggcccctctgatttaatggatgaatcaagaaaatgtgtgactgagccatggattcatggggatggggtcctggagcagaggcttgctgtgcacctactaggtgctgtgtacctcacaagccactggggacatcagaccaccagaataagtccactttccccaaggaaagtggtcaaatgtgggagccaggtgtgcaaatccccaccccagggtgataacagccccaataaaggcacatgcaagggggaccttcggagctgatgacactgtacaggcatctaagaggctggtgacagggtcaccaagcagaggtctagagcagggctgagtggggtagggggggttcttccaggcaaaaggcaaaaactctgttggtaccgtgtaggtcttccacagcacatgccacatgagaagaaacattcgcctggcgagtggctgaagtctataatcccagcactttgggaggctgaggcaggtggatcgcttgagccaaagagtttgagatcagcctgggcaacatggcaaaaccccgtctctacaaaaaatacaaaaattagccaggtgtggtaacccatgcctgtggtcccagctactcgggaggctgaggtgggaggattgcttaagcctaggaggtcaaggctgcagtgagccatgattgtgccaccacactccagcctcagtgacagagtgagaccctgtctcgaaaaaaaaaaaaaaaaaagagagggaaaggaaaaattttattttacatttatgtattgagggcagggaccatgcctgctgggctgctcaccactgctgagcaggattcctggtgtggcatcctaacacaataaatatttactgaatgtgtactcaggaaactgcaaagggttcaggctggcctgagagtaaagtgaaagaaggaagtggtagaagagcccagaggtctgtgaccccagaacctggagggcacctgtggcctgggtctttctcctgcaggcactggggaaaagtcggagggtttattttatttaattaacttatttattaatcaattaattttttgagatggagtctcactctgtcacccaagctggagtgcagtggtgcgatctcagctcactgcaacctctgcccaccgggttcaagcgattttcctgcctcccgagtagctgggattacaggcattcgccaccatgcccggctaatttttgtatttttagtagagatggggtttcaccaggctggccaagctggtctcgaactcctgacctcaagtgatcctcctgcctcggcctcccaaagtcctgggattacaggtgtgagccaccgcgccaggccggtaggagggtttaaacaggaaagagataagcagtcagattcatagtttagaaaatcctcaggttctggtgttcgggtggatgcctggagtggggatctggaaatcaggggcaggggttagtaataacccaggtgaggagacttgagtctagaggcagccaagtggggacctatggaggagttcacgtgctgcaggtgtgcgccgccgaggcggagccaggctctggagctgccaggggctcagaagcctccctctcagatctctccccttttggccacagatgggaaggagagaggcactcacccgacccagcgtggcagtacagtagtgtccaacctgtcactgttgggcgtggtggcgtgtacctgtagtcccagctactgaggaggctgagatggcagcagcacttgagcccaggagttggaggctgcagtgagccgacagcgccactgaactctagcctgggtgacagagcgagaccctgtctctaaaaaacagaaaagaaaaattacaggtcgggcgcagtggctcacgcctgtaatcccagcactttgggaggccgaggagggtggatcacgaggtcaggagttcaagaccagcctggccaatatggcgaaaccccgtctctactaaaaatacaaaaattagccaggcgtggtggtgtgcgcctgtagtttcagctacttgggaggctgaggcaggagaatagcttgaacccgggaggcggaggttgcagtgagccgagatcacgccactgcactccagcctggcaacagagcgagactctgtctcaaaaaaaaaaaaaaaaaaaaaaaaaaaagaaaaagaagaaaaagaaaaaagagaaagaaggaaagaattacataacagtaagcaacctagctagatttgaaccaggccctgcagttctaaagcactggcttttgcggagcggcactcactccgcatcgtggcataggtagatttcttttctaaaggtgaggtcagtgctgggcacttagcaggcgcccggtgggctgcgccgtcctggaggaaggctgattcctcccaccccgactcctggctcgtgggtgggtaatccagcacattctccccaccccggcaaccaactttgtggccgaacaagccctccccggcttgttccgctggtcccaggcgcctgcgcatccggacacgatgaggagcaggtgcgcggggccggggtgtgttcgagggggtcgtgcgcgcctgggctgcctccccgcggacggcggactgggccggggcggcgcttcctggcagagaggcgcggaggggcgtggctttggagaggtgcccccggcgggctggcggcctggctgcggtgaaaggcgggcggacgcaggtgacgacaaccgctccataaagggcgccgcggcgcgacgctcgccttatatgggcaggctcggcgcgggaggggcggggcgttccacccagctggctccgcaccgaggcccggccgaacccccgaggggggaaacttctctgcgagggtggagcctcctcagcggcgtccccaggtcccgagaggggtccctacccaggctaagactcacgacgggctccaccctgcaggggctcaacttgcagaaaccctggggcctgccttccccaggggtctgccctcctcaggccctgctagggcactgactcggtttgtgctgtgtggcgttttttccttcaccccacctgggccgcaggtcctcgctagatagccgagggagggtcctttaagtgagctcacctcggagcccccagataaccaagcctgagcctcccggctacatggcgaggcttccccaatccggtcagccccaagcaggtgcctttctctaactggcacaaaggaagtctcctagccaggctgagcccaagcctcggtaaacatgagccttggatccactggaagtgtttggctaactgggcccttcttggccagacaagactttaaccctaagaggaagctgccagcatgacgcagcccaccatattctccctccaagctctcttcatagcccgggtccttaaaaacccaaatctgtccaattgctacttgccgtccactcgttgacagttactccgcttcacagcctcccgatcacctgagtgtcctccctcggctcagtgcacagggctctgtgagcttacagttccctggttgccgttccgtgcctcccagccctgcacctgctgctcctttctggaaagccctttccttgcacactcccagacacgtgctcacccttcagagagatacttcttagcgtcttcttcctgacatttgtagtgattacttaacctttctgagcatcaatttcttcatctgcaagatgggggtaaaataatccccacctcactgtgttattgtgaggatcgaatgagttaatgtttgtaaaatgcctggcatatagtagctgctcatgaaaaactcgttgaccaaattcctcttcctgtgctctaattgctcatgtatgtgttgtgagtgccatgaaggctggcctcttccttttccagctatgcatacctagttcctggcacatatatagatcttgaaccagtgtttgttggcgaatgaatgaatttcaggcagtaggggtcggggagagaagagacccctaactgtgatggtcatcaaccctcacatctgccgggatgtagggcattctaatgcttcccccctcagttgcccagagcttcatggcaaccaggagggacacagcatggatatggaccccgttttccagataaacctatgagtgattagaggtgaagtaacttccccacggttacacaatgagtggaagagtcggcatcagggtgaccaacgtgtactttttttttttttttttgagacggagatttgctcttgtcgcccaggctggagtgcaatggcgcgatctcggctcactgcgacctctacctcccaggttcaagcaattctcctgcctcagcctcccaagtagttgggattacagttgcccacacgcccagctaattttgtatttttagtagagatggggtttcttcatgttggtcaggctggactcaaactcccaacctcgggtgatctgcccgcctcagcctcccaaagtgctgggattacaggcgtgagccactgtgcccggcccaatgtgtattattattattattattattttagcactgagagttccacgtcccaggaatctctttagtctcaggcagccaggatggttggtcacccaagatcaacttctaaacgttagtctctgaggaccgccaccttccaacctcccctgcacccgtcccattattcccaagtattttactgcgttcctgaaggggacacaggctctccagcccagaaggtccaacagattttaaaaagtcacactctgattccccaaaaaagttagactcacagcacagtagggatgggggacaaggacattggaagggcattgaggccaggtgtggtggctcacgcctgtaatcccagcactttgggaggctgaggcgggtggatcacttgaggtcaggagttcgagaccagcctggccaacatggtgaaaccccgtctctactaaaagtacaaaaacaagccaggtgtggtggtgcgcacctgtagtcccagctactcgggaggctgaggcaggagaatcgcttgaacccgggaggcaaatgttgcagtgagctgagatcgtgccactgcactccagcctgggcgacagagtgagactctgtctcaaaaaagaaaaaaaagaaggcccaggtaggagtttgcttcactttgacagggactcatgggccactcctgcaccaggccctgggcctgggaccaggaactgagagaaggctggcccccacctgtgggactctagccaggtgggggagacagatgtatagacacaatgccaacagtttggttcctcgacggctggagaagggagtgatcgaccagggtttctgaagaaccccctcctgacgtggccactcaccagctgacctcaggcctgtcccttcctttggctggccctggaccttctctgtcaactcaggcagttggagctggtccctgagggccttcctgccctgaagtcatgacttgtggggagctgagttctgggaaatgcatcctctggagaggcaccagaggccgcgcatgcctgagtgagtgtgggggtgcgccctggcctcactagccaaacaccaacttcatcttcccaggctaccctggcccgagcagctccggctccttccctgcctgcctcatcctcccaggccactgtccaggaagctggcctctctgcctgttccccacagcccctgggggtggggccagagtagggcaaaaagggcctgggcctggcccagcagagcctctgcccctccttcgggggctcctgttcttgtgggctgagagctgcagccctgcagccggcctggctgtggctcagtggtcagggccaagtgcagagcaaacaccctgcccactgggcagccatttcacggtcattcccaggctgcatggggtccccagtcgggcaactaagtgcagatgtgaaacaacgagctttccaagatccagggatttgacccttgggaaagagactccctaagggaactgcttcctgtcactccccaaccaccactttgagaaataattttctctccctcaacctcactgccagcctcagtcaagagcaaaccgaggactggtagtgggagctcagggccaccttgggattctctgctctcgctgctggctgagcccaggcaaggcccctgccctctctgggcttccatttccctctcctgctccaaacttgctagcttccttccctatctcaacatcatagggacccttcgagatgggaactactaataggggaaatcatatgggaaaccaggctgggcgcagtggctcacacctataatcccagtactttgggaggccgaggtgggaggatcacctgaggtcaggagttccagaccagcctgaccaacatggtgaaaccctgtgtctactaaaaatacaaaaattagccgggcgtggtggcaggtgcctgtaatcccagctactcaggaggctgagaggtaggggaatcacatgaacctgggaggtggaggttgcagtgagctgagatcctgccactgcactccagcctgggtaacagagtgagactccatctcaaaaataaaataaaaaatgaccatatccttataggaaccattattttgaactcagaatctcagaaaaaccaggatttggggcctggaactttctttgtcttattttgttttgttttggattttttggggagacagagtcttgctctgtcacccaggctggagtacagtggcgcgatctaggcttactgcaagctccgcctcccgggttcacgccattctcctgcctcagcctcccgccaccacgcctggctaattttttgtatttttagtagagatggggtttcaccgtgttagccaggatggtctccatctcctgacctcgtgatctgctcacctcggcctcccaaagtgctgggattacaggcgtgagccaccgtgcctggctggggcccggaactttctaaggcagaggcggcagagacaaagaggtggctggaggtggggcagtgccgagccaagtctcaggacatccctactgccgagcctcccctcccacaaagtaaaccggcaggtgggcagtgcaggcggggcccagctcgggtttcactccttccccgctctcggggacaataaaatgctccctttgccctggaaatcccacttgtataaaatccaaaagaagaaataagctcttatgttcaaacaggtttgttccaacctcatttataatggaaaaatattaactgaaaaattccttagtatccgacaatgggggagaagttaacagtttgaccggagctgagtgacatgcaaaagggtgtttgtggagtgcagggagctcctgctgtgtgtgtgggagggtggagagggcatggggagaggagcagggaccccagagtcagactgtctaggtttaaatcctgtctgctccttcctagctgtgtgaccttgagtcataacccaaagccctctgtacctccatgtccccctccataaactggcactgggctgggcatggtggcttatgcctgtaatcccagcattttgggagaccaaggcaggtggatcacctgaggtcaggagttagagaccagcctggccaacatggtgaaaccccgtctctactaaaaatacaaaaattagccaggtgtagtggcaggtgcctgtagtcccagctactcaggaggctgaggcaggagaatcgcttgaacccaggaggcagaggttgcagtgggccgagattgtgccactgtgctccagcctgggtaataggtgacagagcgagactccgtctcaaaacaaaacaaaacaaaaaaaaggagagagagacttgggggatgtgtgtgcccagaggaaaatccatgtgaggacccagcaagaaggtggccacccgcaagccaagcagagaggcttcaggagaaaccaaccctgccagcaccttgattttggacttccagccccagaactgtgaaaaaataaacatctgttgtttaaaccacccagtctgtgatattttgtgatggctggcctagcaaactaatacacattactaacacacaataagagaagcgtttaatagggcgcttaccacgtaattgcattgtgttctgacattacatttacgatctcataaccatgaggagggtcctgtcctcccatttcagagatgaaggaaactgaggcttggctagtgacggagagggctgtgactggagccaggactgtgtgactccaaggccccaccaaagcctcctcctgggatggaccatggactttcctgcctctgtgctgtgcatacgctctcccttctgcctggaatacccttcccaccacttgcctctcaggacgagtcccagtcgattcttcaaaactcttcttggcccggcaaggtggctcacacctgtaatcccagcactttggaaggccaaagtgggtggatcacttgaggttaggagtttgagaccggcctggccaacatggtgaaaccctgtctctactaaaaatacaaaaattagctgggccttgtggcaggtgcctgcaatcccagctattcaggaggctgaggcaggagaattgcttgaacctgggaggtggaggttgcagtgagccaagatcacaccactgcactccagcctgtgcaacagagttagactgtctcaaaacaaaaacaaaaaacaacttttctcaagcatcacctccttcccatgctttacccgacaatctccttttgcagatgtgctgcttttcagggcttgcggccagtctgtactctgtcaccatggtggtaaatgtcatctctcctgtagcatttagactttagatgtgtccatgtgtttgctgtgaactcctggaaggcaggggctgtgtcttgctctagttcctatcacccagcaggcccagaggggctccgcacagacgcttgctggctgaggtagccagtttggcctggagagagtattcccgcctcaggagtggatcatgaggaaatggaatctcctgcctccttgtggggtgggggttgggggaggtggataaaagagaggctccacctggcacggtggctcgtgcccataatcccagcactttgggaggccgaggtgggtagatcacctgaggtcaggattttgagaccagcctggccaacatggtgaaaccccatctctactaaaaatacaaaaattagctgggcacctgtaatcccagctactcgggaggctgaggctggacaatcgcttgaatccaggaggtggagcttgcagtgagccaagattgtgccactgcactccagcctgggggaaaagagcaaaattccatctaaaaaaaaaaaaaagcggatcaaggtccctactctgggcatgagaggagggatcctttgacactcctgggagcagcagtgtggcagaggaggaggagcagggcatggggtcagccaccctcagtccatttcccagggtgtggccttaggcacggtcactacctctctgggcttctgtctccacatgtatgaaatggaatcagtccctccttccacaggtgttaggtcgaagaaggcacctctggtggtatcggcacagaggctggacactggatgacttctttgctgggacactgaggtagggggcagaccagagacagacagctacttgcctaagctcacccagcaagctggctgaaggtggagaactggcttgtcctccagttggtagttaacagctgtctagcaggagtgttcttgctcccaggagacgctccgttggctgccacagaggtaagcgtgagagtgcgctcagaagtggctgggaggcatggagaacagaggagcaggttcagggtgaattccagtgggcattctccaagggtgaggtcactgcctccaactccctagggctgcctgagacacaggcaccaccaagccagctccagagcaggaggaggtggtggcagggaccagggccaggtcacagggctgaatgtaaggccctcagcctggtacagcgacgggcccctcccatggtgctggggtccttaccttgggaagcccggtgtttcctgtttaagatgtggctgggggtaggggaaaggagaaagccacacagataacacttctggaacttccaatcggtgccagcgtgcttccacctgctgagccgtgacctcatttgcagggactgtcatgagccccaacttggagatggtgcaactggggctcaaaatggtgaaaaccttgtcccaaaaggaaagcagtatagctaatgagcaagaacaaagagaatttgaaattaaagacattggggttcattcttttccccttttttaaaatttatttttgggccgggcacggtggctcacgcctgtaatcccagcactttgggacgctgaggtgggcggatcatttgaggtcaggagtttgagaccagcctggccaacatggtgaaaccctgtttctactaaaaatacaaaaattaaccaggcatggtggcaaatgcctgtaatcccagctactcgggaggctgaggcaggagagctgcttgaactcaggaggcgaaggaggttgcagtgggcagagatcatgccattctactccagcctgggcaacagagcaagattccatctcaaaaacaataaaataaataaataaaatttattttttatatttttattttttagaacaagatctcactctgtcacccaggctggagtgcagtggtgagatcacagctcactatagcctcaaactcctgggctcaagtgatcctcccacctcaccctcccaagtagctgggactacaggcgcacaccgccatgccaggctaatttttttttaaattttgtgtaaagacagggtcttgctatgttgcccaggttggtcccgaactcctaggctcaaacgatcctcttgccttggcctcccaaagtgctgggattacaggcgtgagccatcgtgtccggccacatcggagttcaaatctgagctctgaactccattcatgccaagttacttaagccctccaagcctcagtttccttgtctgtaaaatggcggtaacaatggtccctgctgttggggttgcggtggagactcagtgagaggattcatgtagcacacactcagtaagtgccagctgtcactgccagcctatttcaccaccgtgaacacagagcctcagaatggaaaagcagcctgcccaaggtcgcacaacttgcaggtggcacaggcaggatctgaatccagatcagattcttcccgccctacttctatcaccgtggaagggcctgggggggcctgcagccaggaggtggctggaaagggaggttccttggaacaaccagtggcccaggcttcctgcagagccggggaccccagccctggccagggtaagggtcacgcctgcagctggtgttccaggcatcggagaggaactgcggctgcaggcctggcagccttaccgtcgccagcatcctgccctccatggacacggccccaacattgttttctgggccgttccctgcccagagcccacacattcgggatttccgcagcttggccagcactaccttcgcttcctggagcagctttccccaggcggccggggtgggggttgagctggccctggcccctggtaggggcaggcactgctcggaaggcagtggcagcagcgccgtcaacatcctcttgacctgacaggtccttacccgagttctacctcctcagaaacacagcggccctcctcactcccctctcctgaggccagcgtagaaaaggccctacctcatttccactttagggtaggctggagtgagagcccgggttaaaatcctagccctactacaaaggtgctgtgacctgggcaagcctccccttccctctgcctcacaagggatgctgggtagcctgaggtgccttaggctgccctgacatcagctcagggatgaccggcgccccgtgctctgaggtctctgggcataataagctccttgatgacagggtcagtttctctcccgtgttctgcaagtttatttttattattattattatttttgagatggagtcttgctctgttgcccagactagagtgcaatggtgtgttctcatctcaccgcaacctctgcctcccaggttcaagcgattctcctgcctcagcctcccaagtagctgcgattacaggcgtgcactgccacgcccggcaaatttttgtatttttagtagaaaaggggtttcgccatgttggccaggctggtctcgaactcctgacctcaggtgatccacccgcctcggcttcccaaagtcctgggattacaggcgtgagccaccgcgcccggctccatgttctgtatatttagaaggaacctgtgtgagtggccaccaaacgttcactctgaaccatgctggcgctgcctgcaggtgagcgtgcctgcccagagtggtgtctcagttgtctcactgcccaccctggcgctccgtctcctctgtgggctggcacctgctccctggtagggcggagctgaggggcacaagggagcgtggaagtcaagcagccagcccagcaaactcgagcttccacccctgccgcctctctgcaggcaaccacgtgcactgggtgtcaagaaaaaatatacaggggccatatcccgggttgtcttcaggctcgggaagcctgcgactttgtcccctttccccggcttcccaacctggtggctaaaggcttccagcaggtgtctgccaaccccatccacagtcatggggcccaatgtggcacccagagaatgaccgtgggctgacagcccagagccagcggcatccccggtgaggtcagtgtcctggaattggtcaaacaggatcaccaggaggattccgtgagcacagccagcatgactcacggccatgatcagcctcacgggcagaggctgccaacctgggatggccacagccaccggctcaccttgcagggcaacgcaccttttaaggagggagctggagcagcgcccgggtcctgcctctggccaaggcctctgccacacttctccacgcccacccgggcagagaggccagacccccactgggttcaaatttggcaccacttttcagacatgaccttgggcaagtcgatttctctgaactgtttttttcacttatgatatggaaataatacttgcctcacaagagtggaattcgatgaggtaatgtgtttagaaagtgcgtggcaaacggtgccttttaaggagcggcagtggggtccggtggaaagggccagggctcgggagtcgaggcgccccagcattgtgctctggccccaccctgggctcactgggtgtctttgaaagagttactcaacctccgatctgctctgctcccactgtgtcaaatgagctgacaccacttgccttgttgcctgttgtgagatgaagatcacacacacgccaccttctatcagatgacaggaggcagcgagggtggttcctgggggtgggtgtggaaggctgcctggccttgaatcccagctcagccactcaggggctttgtgacctggggaaggctcctcaacctctcggggcaggtctcaggtggaatctgaagggcaacgccttcccgcggggctgtgctgagctgagaccctcaaaacagtgccaggtacctgggaggtgcctcctgagtctgggcaggtcctgctcatcttaaccagggcttttggcctttgcaggatgttcactccaccagcttccgtctccactgacgccagttgctggttttgtcccctccatgtgcttgtgacagaccccagggtctggggtccttcagaggccacgggcccctctcctccctcggtctcggcagccttcccaaggcagtccttgggtgggcccctggagaatgcagacagttctaatagaacagggtgagcctctgagaacagagcaataccagccccatggcatccctggggccacggagtagggtgtcaggatccccctgccgccaagcacctgattcacaggaagctggggcctcatccaggcaaccgagccctaatgacagcttggccctaggagcaaggcagacggaaggaaggctttcttgactggcaagcctggctcccttggcacactcctctatggccaaggggagctgggggccaagaggggttgtctggtcccaaggcccagaagttcctgcaggcacccatgggaaggatagcctgatccccacagggccaggcacctgctggggcagccaggagccctgtcagttggggaggcctcagaagggtcaaggggatcagctgtgggagcccaggtttcagaggcaaccacgtctggatagaaaccccagctctgcatcccatgagccacagtgtctacatcggggtaatggggacaacagcctcttgccttaggagggcacgaggactggcacatggcatccttagaatagcagccactgctgacaagcatgttagtgaacaggaagggctggttggagagagtgttgtggagttaggggaggatgtggggacagtggacaagccccctgggaaagggtgacaagtgctctgagcccacacagatgtgacattgcagatggtgcagacccttgctttatttgtctgacttgttcacagttcagccccctgctcagaaaaccaacgggccagctaaggagaggaggaggcaccttgagacttccggagtcgaggctctccagggttccccagcccatcaatcattttctgcaccccctgcctgggaggcagctccctggggggtgggaatgggtgactagaggggatttcagtgtgggacccagggtctgttcttcacagtaggaggtggaagggatgactaagttctttatcacagacctacaaaaaatgagataattagatattactctcactagtttgggcttcttttttctttttctttttacaaaacagcagctggaaagagaaatgtaggtggcagacgagccaggcacgaggtttcagattggaagggaccaagatgaggaccaaggtgtggctgcctgactaggaacgctgtgggctggcccaggctctcgccacacatcctgggagaactgccataggccctagaaggagggatgaaaggcgtatgggagggaagacagcggtccccggatcagcagcagcaccaccatcctctgatggcccctgggcagtccgccagctcggaagcactcagggctggagcctgggctctaagcatgggccccaggagccagacaggagggaggcagcaggaagggctggcatggaagggctgagttctattggggtcccacgcgggcaagggaaccaggactcatccctgcttgtcagccaatcagcttcttcaggaaggcctccaactgatcctcatccttgatgcccacaaacttgtccaccacgtccccattcttcatggccagcacagtgggcaccgctgacacctgggtggagaggacaagggggtccaagtgaattgggagtgaatacttctcaactgccactcctgagcctttgtggggaaggctggtggcttatccagggcactgacttcccaaagccatgggcaggcctagaggaacatggctcttctctcggtgcaggggtactgcagggcccgggggccacccgctgaagaaacgtcttccattgcgggctcccaacagtacccttcctcccttaaccacaagactgactcactggcccagtggttttgctggaatgacaggagagatgaaaataacccttgcagctgcaggccagggctgggggcagggaggagctcaggggaagcctggcccaggaggagacagaagctgggggacagttcgagtcctggctttgcactcactagcaagggggccttggccgggtcacagcacctttctgagcctcagtgtccttttccataaaatgggggtaatgtctacctttagggtttgggatgaacattaaagattcaagtataggctgggcacagtggcttatatctataatcccagccttctgggagactgaggctggaggattgcttgagttcaagagttccagaccagcttgggcaatatagtgagaccctttgtttactaaacccccccaaaatattagccaggcatggtggtacatgcctgtactcccatactcgggaggctgaggcaggaggatcgcttgagcctgggagactgaggcttcagtgagctgtgattgtgccactgcactccagcctgggtgacagagaccctgcctcaaaaaaaaagagaaagatttgagtataaagcagagctcaggctgggcgcggtggctcacacctgtaatcccagcattttgggaggctgaggtgggcagatcatttgaggtcaggagttcgagaccagcctggccaacatggtgaaaccctgtctctactgaaaatacaaaaattagtcgggcatggtggcaggcacctgtaatcccacctacttgggaggctgaggtgagagaattgcttgaacctgggaggtggaggctggagtcagtggagattgcaccactgcactccagcctgggtgacagagtgagactccatctcataaataaataaataaataaataaataaatacataaataaagcagagctcaggttctggcggacgcaatccggctcctaccagccaggtgagctggggcacgcccctcagtcactaagcctcagtgttctcagatgcaggatggagatactaagggcactgccattagagggcatgaaagctgaatgaaataacgcaagtaaaggctcagcacagcgcccggcaaataagcttaggaacctggcattgtgcctggcatactgtgggcattcaaaaaacagtggctacagagggcacaaggaaaagtccaacacaggccccacgagagcacattagcttgctgctgtgatgagtgacagggtccagaaactcagggacttctactggacagcatgagaggagaggcttggccatacacaacctgacgcttattagcaggttgcaggcagatggcaaggacaacattcttggtctgtgaagcatttactcagttccctcagggacctgcataggttatgtggaacgtggatgaggctgtggcccaccagactggcattgtgaggtctctgctgcctgggatccctgcctggcattcgtgggcatttgagaaaaccatttaaacagaacaagataggccggtcgctgtggctcacgcctgtaatcctagcattttgggaagccaaagcgggcagatcacttgaggtcaggagttcgagaccagcctgaccaacatggtgaaaccccgtctctactaaaaatacaaaaattagccgggcgtggtggggcatgcctatagtcccagctactcgggaggctgaggcaggagaatcgcttgaacccgggaggcagaggttgcactgagctgagattgtgccattgcattccagcctgggcgacagagcaagactctgttccccccctcaaaataaataaataaaaataaacagaacaagataaacacagacttttcttacatacaaattaaactacaaagtaagagcagagattcacacaaacataccaggtcttcacatatcccagtgctgccctgccacggcccatcttggaagccagtaagattcagaatgttcaaaaaccatgcacatggtagttaggaaaggcacgcaggccagaccatcccgccctcacccactaactttacgtggcaggccctgcaccccactcctcacggacactttggggacaaacacagcaggtcacaggacacagtccttgtccttgttagtgcctcaggccccttcaaaggctgtccctgggctgatgtgggtggcaaaccctgtctccaggcagagcagggcccgaaagagtttgctccaggaagcgcctgaagccaccagggccttcccaggcattctttggtgccctctagtggtctgcaaaggcagctggagtgcctcaaagccggagcctcttggcagaagcagagagctcagccaccggctcccacctgcacactgtcctattcctttaattaaaatatatgctttatgccactgtataagaagtggcctaacttttttcacggcaagactctaagttcactgaagaggctcagagagtggacttagcgttccttaagaactccagataggcacaagcacagtggctcacacctgtaatcccaagtactttgggaggccaaggcaggaggactgcttgaggtcaggaattcatgaccagcctgggcaacatagcaagacgtcgtctccataaaaatattaaaaaaaaaaaaaaagaactccagatgaaggccataatgatctcactcatgtaaacctccacacatgcttgaacacgcacagaccctgctggtgtcaggtagacagcagatgtgctgtcaatggaggtctggtcactactgatcaaggggatattttgaagttgagcttaaacacacacacgcatacacacatatatacacacacacacatacacactacccgcactaggggctcacaggaaacctgagctggaatgggacttccctcgaccctgaggaggcggctgaagctctgctgctcctgtgtctggctcacacatcaggaggtgccggtgcctgtaaacactgccttacatggaagtgcacagggccttggcacattcttctggaatgttttgagtgtgaaagaggcagtgactgagccaactgaggggctgaggaaaagatacgctacgacgtgttgcctgtcctgttccgtgaagccacttggaacctcctatccttggataaagaccctctgaactcggcaggagtgggggagtgtgtacgtgtgcgcagtctctttctgctaacccgtagctcgcctgcaccgccactgagctccgtgtcctggtatgtcttctcctgtcccaccccgatggcatccatctgttaactcagctaagggcctaccaagggaaaggcacagtgctgggtgctgcgggatgttgcaacctcctcctcggctcattgcagagttaaaaggaaaagatcgctgtcacatgctgggtgctttttcgtgtcaggaatgatataaacacctctatacactatctcacactctcctggctgtgggcaggatcattttaacgatgagaatactgaggctcaaagggtgagcaactgttccaaaatgatgtggtgtaggacaggcgcggcagctcctgcctgtaatcccagcactttgggaggctgaggaaggtgaatcatctgaggtcaggaattcgagacaaggccggccaatgtggtgaaaccttgtctctaccaaaaatacaaaaattaggccgggcgtggtggctcacgcctgtaattccagcactttgggaggctgaggcaggagaagtgcttgaatgcgggagatggaggtcgcagtgagccgagattgcgccacttcactccacctgggtgaaaagagtgagaccccctctaaaaaaaaaaaaaaaaaaaagctgggatctgaaacaagatctgtttgactttgcagtccaggggatcaaactctgttgtgcttctgcccagcagcaaagagagagagacatctactgagtcccagcagggggaagaacgtggggacgcattaaaggatttcatgcttcaaatgcaaaatgccaagtgctttgtaaaagcttttagatatgagagggttcttggaaaaacgattattgaaaaaatgaactacataacattctggcagaattaggtagacagtgaaaagatcaagagtcgccaggcctggagggaggaggaaggagagatgaacaggcagaggagagaggacatggaggcagtgaaatgactctggatgatgctagaatgtggacaccggctatgacacatttgtccaaacccacagcaggcacaacaccaagagtgatcccctatgtaaacttttggctttgggggataatgatgtccgtgtaggttcataagttgtgacaaatggaccaccctggtatgggctgttgatagtgtgggaggctgggcatgcgggaggacaggggacttatgggaagtctctgtaccttccccttcctctcaattttgccacgaacctaaaactgccctaaaaacataaaatcctcaaaaagaacaacaacaaaaaatgagatcagtgactgctggggggttaagggggtgaggggcaggaaggagaggtgaactgctggaaaacaggggaaccgagggcggtggaacggttctgtatggcgctggaatggtggacacatgccattatacatttgtccatgaactttctcactggcaagcagtctgtgctgagagcggcagctgagacacggccttccaaagagcagttcctccccacagaaagtcagtccggggccttcagaaccagaaagtcaatctggggccttcagaatgaaaaagtcagtatggggccttcagaacattggcttctctccatgtcggctcaggacacccagccctggcattacctgggagcttgttagaaatgcagtcttggtggccgggcgcggtggctcatgcctgtaatgccagcactctgggaggccgaggtgggcgaatcacttgaggtgaggagtttgagaccaatctggtcaacatggtgaaaccccatctctactaaaaatacaaaaattaggccaggtgtagtggctcacgcccgcaatcctagcactttgggaggccgaggcgggctgatcacctgatgtcaggagtttgagaccagcctggcaaacatggtaaaaccttgtctctattaaaactacaaaaattagctgggcgtggtcgtgggcacctgtaatcccagctactcgggaggctgaggcaggagaatcgcttgaacctgagaagcggaggttgcagtgaaccgagatcgtgccattgcactccagcctgggcgacagagcgagactccatctcaaaaaagaaaaaggattttaggccttaaagaaagccatcatggggggcactgtagttctctcagaggaaacttcttcctcaggctctcttcagaaagaaaagaggaaggaaggaaagaaggaagggagggagagagggagggggtcaggaagaaccctggctggagcttcctaaaccctgcaatgatgtcagaccagggtttggctaaacaacacggctgagaccaagtgatgtgggcctagcagccttgaggcctttctgtgtgacagcacagtccccaggcagtggacagggcgggagcggtgggtgtggggggagattgagaggattccacaggaggcatctccttctcacttcccaggcttcaccgcaggccttcagtgcccactcccacaacagcctcccggggacggtcctcggcattcccgccaccccacgagacactggagcagggcctgtgggcttctttgcatctgcagtagttaccatagtccctgcacatggctggccctcagggggtgtctgctgaagagttatgaatacattggctgaagctgaagctgtagtgtctggcagagccaggaggcctgagacatctgaagcccacgcgtgacctgtgggaggccctaggagccccagcccgggctctcacccgaggcatagccaggcaggggaaagccaggggcatccaaatgggcagatagatgcctccctcactgagcaatcagtggccaaactttttgaaaaagtgactcacccctcccccagcccctgtaaacagccctcagttcctaactcccaaagcaggcctgctccagtggtcacctgtagtggccaccgtgtttgtctgcctggtctccatctcccctgcttctggtcattgcagactgatgttcctttgggtaatcactccccactccctgcgtagctcaaggggcggccagcctgttctcaccccgctcccaaccacccatttcttgctgcaggagactggttcagggatgggtgcctctatttgagctggtctagtaagagtgaaacctggacttgtatactctgaggaataaagcggcctctttcattcacttgttacctggaggaggaaggagggaggggtgaaggctcactccggccaggttaagatatttcaagaaaatcagatatcgagattttcacatgaaatctgagtttcaaatatcagcatctgcttcctattactttaaaatacttcgagtgccagactaaaagtgtctgtgagccaggttgggcccagaggctgccaggagcgccctcggctctgtaacagcgctaccttcagcatggctattcagagaccctcccaatccggctgcattatgctttccccagctccgtactcggcccttcactctggccacccagacaaagtgggcctctcccctttctccaggtagtggtctccaaggcccagaggaagcccccaacccagacacctccaggcacctggcccctgctggtctgtaagcaacccaggctcatcagacctcagggcttttgctttgcctgaattgttcttccaaagacccacatgcttcagtcactcccttcctgtttttgcccaaaggtcagcttatcagggagatctaccctatcccaccctttaaaaaagaaacccgctgggcgcggtggcttacgcctgtaatcccagcactttgggaggccaaggcaggtgggtcacccgaggtcaggagatcaagaccagcctggctaacatggtgaaacctcatttctactaaaaatacaaaaaattagccggcgtggtggcgcgtgcctgtaatctcagctactccggaggctgggacaggagaactgcttgaacccgggaggcagaggttgcagtgagccgagattgtgccactgcactccagcttgggcaacaagagcaaaactctgtctcgaaaaaacaaaaaccctgcctcatacgcagtactcccatcctctcttcctgatgtatttttctccattgaacttattatctaaaacaggggtcagcaaactatagttcacaggcccaatacagcctactgcttgtttttgtaaataaagttttattgtaacacagccatgcccatttgtttgtatagtgtctatggctgctttcggctacgagcccagctgaatggttgtagcagcgaccactgccctgcaatgcttccaataccaaccagtcctttagagaaaaagtttgctgacccttgatttaaaatactagaatgtagactccacggaggcagagattttgtcagttttgttcactgccttatcctcaacaccaagtaacactacctggcacttgagggactctcaaatatctgctgaataaacagacaaaccaaccaaccaagtgagacgactccatgtctttgtgcacgctgtttcctcagcccttcctcctcctctgcgcatccctcatggctcagctcagaggttctctctaacgtgaagcattccctgtcccctccagctcccccacaagcaaacagtcccttcttcctttatgcgcctcttcttttagcacttctatattgagatgatctttctacctgctgttctctcctgctagactaggagagatcttgcttggaaacaagatctcatcttgtgtcagaatcacaaatgcttggcacatcgagctcccaaatgactgctcactgaacatgtgggtagatggataaaggaatgtaccaatgtctgagactaagtgaatgacctggtgtttttgggtcatacgatctacttcctaaaggtggtgaagagagacaggtggctcagaggatcaagagccacctctgcaaagtgctctgagctcttaaaagctctcgaaaaaccggctgggcgcagtggctcatgcctgtaatcccagcactttgggaggccaaggtgggtggatcataaggtcaggagttccagaccagtctggccaacatggtgataccctgtctctactaaaaatacaaaaaattagctgggcgtggtggtgtgcgcctgtagtcccagctacttgggaggctgaggcaggagaatcgcgtgaacccgggaggcagaggttgcaatgagccgagatcatgccattgcactctagcccaggtgacagtgagagattccgtctcaaaaaaaaaaagctctggaaaaaccaagacaccttgcttactggctacctgtgctccccaagatacctcctacaccagctatccctgggcctgacacctcctatactggcttccctgtggcaactccctgtcaatccatacctcatactcaatggcgaggtctgtgtggtcatcaatatccaccttggccatcaccaccttcccgtgctgcttggccaccatcttctctaacctcggccccaggatcttgcagggtccacaccacctcaaaaggcgagaaaggaagcatccagtcagtcaaaagagcgctcagcatcccctactggcttcccagacctgcatctttccaaggaatcttttgcccttattatctctgtttaccatgtttaaaaattaacacaccaaatggtaatgccaggagattctgcacatgggaaatcttcacagatcccagacttttaaaacacaggcctcatcagaagactcataataaaagtgactcatttcagtatatctcagataaatatactgtcatataaaaggatatgggattggaagttaaaaggttcaaacagaggcttctcaccaaccagctgattattctggggccctagtttcctttttttctttttttgagacggagtctcgctctatcccccaggctggagtgcagtggcgcgatctcggctcactgcaagctccgcctccctggtttacgccattctcctgcctcagcttcctcagtagctgggactacaggtgcctgccaacacgcccagctaattttttgtattttttagtagagacggggtttcaccgtgttagccaggatggtctcgatctcctgacctcgtgatccgcctgtctcggcctcccaaagtgctgggattacaggcatgagccaccgcgcccggcctgggccctagtttcttcatctgaaaaagagagattatggctctcaaagctattaggagagatcaactaaggcaatgtgggtaaacatgcattggaagctgtggggatatttcaaacaccatgtggactcagaactaaaaggaggggaaccaatggcctggagcgtctacaacgcaccagtccctggctcactttctctgcttttaccaaacacacccctcaactctgcaaagagaacacaccttccaaagaaactgaagcccatacgagttaagaaacctgtgcaagattagagaagcacagctgggatcgatcacaacccaaagctgtgttgaaagtgttttctttggccgggtgcggtgacccacgcctataattccagcactttgggaggccgaggcaggcggatcacctgaggtcaggagttcaagatcagcctggccaacatggtaaaacctcgtctctactaaaaatacaaagattagccaggagtggtggtgtgcgcctgtaatcccagcttctaggaaggctgaggcaggagaatcactttaacctgggaggcagaggttgaagtgagctgagattgtgccactgcactccagcctgggcgacagagactctgtctcaaaaaaaaaaaaaaaaaaaaaagagaaagtgttttatttcacccacaggctactctgatcccacagcccctgagttgaccattatcactgccctgatcataggtattcccctctcgctggggaagctcatccaggacaggcctggtgctgtcatctctatgtatgtggcaccaaggaaagtgcctggcactgaatgaacaactcacaccaccccacttccttactgaacaaaatgaggcattatcccatttattgttcatttcggaaggcctctctggaatgctcactacaccaggaggccaagacagttccacctttcacaaacccctggctgacaactcctattttattctcagcacttacttatttatttttgagatggagtctcactctgttgcccaggctggagtgcaatggcgcgatctcggctcactgcaacttccgcctcccgggttcaagcaattctcctgcctcagcctcctgagtagcaggtgtggtggtgcacaccgcacccagccaggcctgacggttttaaatgctgaaaaataggccgggcataatggctcacacctgtaatcctagcactctgggaggccaaggcgggagagaatcacctgtggtcaggagtttgagagactagcctggccaatatggtgaaaccccgtctctactaaaaatacaaaaaaattatctgggtggtagtcccaactacttgggaggctgaggcaggaaaattgttttaactcgggaggtggaggttgcagtgagctgactgaaccactgcagtccagcctgggtgacagaatgagactctgtctcaaaaacaaaaaaggaaaaaaaaccctcaggcctggcgcagtggttcatgcctgtaatcctagcactttgggaggccaaggtgggaggattgcttgagatcaggaggtagagactgcagtgagccgtgatcgcaccactgcactctacattctagcctgggtgacagagtgagaccttgtctctaaaagaagaaaaacaaaaacaactcataacactgaaaaacccagtgtgcaagaccttatctcctattacaagtgaagaaagggagcacaaagatatcaagtggcctgcccaaggccacagggtgagtcagagaaacaactggaaagccagcgaaacaatctgtcagagacctgaccagaaggcccttcaatttctttttctttttttttttttttgagatggagtttccctctgtcacccaggctggagtgcaatggcgcgatctcagctcactgcaacctccacctcccaggttcaagcgattctcctgcctcagcctcttgggtagctgggattacaggtgcccgccaccacgcccgattaatttttgtatttttggtagagatggggtttcactatgttggctgggcaggtctcaaactcctgacctcaggtaatccacctgcctcggcctctgaaagtgctgggattacaggtgtgagccactgcgtccgacctgaaggcccctgaatttttaacttatgctacactggtttctcccaggatgcctcattcagagggctttgtccagcttttgtgtagttgggtgtctagccaggccccaaagatctagaaatgaaaaagcccaggctaaaattcagaaggccagagggacttaaatatctctaaagcaaactcagatagcactgaaaggaaactccttcctatgccctgtatgcttgggcaccacggtagtgacaccgataactttttttttttttttttgagatggaatttcactctttttgcccaggctggagtgtaatggcgcgatcttcagctcactacaaacactacctcttaggttcaagtgattctcctgcctcagcctcccgagtagctgggattacaggcacacaccaccacgcctagctaattttgtatttttaatagagacagggtatcaccatgttggccaggctggtcttgaactcctgacctcaggtgatctgcccgccttggcctcccaaagtgctgggattacaggcatgagccaccgcacccggccgacactgataactttttgccagcccttcttgcggttttcatggcaggatgttaacatcagcttatctgcagggccaggaactggtatacaccaaaagcaaggtgacagtcatatttttccaactctggtccatgctaaagatgacgctgagctttctggggattgagaaacagaacatgtgtttcccagcactaacagtcagctttgcagactgttcacttgtctgtcttccaccagactgcattccccttgagggcagggactgggcctgaccagtctgtatattgagtctacatatgagcagcatagaacatggccgtgggacacagcaggcattcaataaatacttgaacaagtaggaccctagtcttctgtggacccccaatactcactgtgcgtggaaatccacaaccactggtgtctcactgttgaccactcggtcttgaaagtcaggtccatcctggatattaaaggttgtcaaggagatcctcgtggtgtatattgtccgggctgggttgggtgttacagtcaggccaccaggactgcattgtggggtctgcagggctctggaagtgaggggtggccactgaccctgagagggcttcctggagatgacagaggccaggaacctcctcagaagaagtcgctgagccatctgtgagggaaagaggcagaagaactggggcacacaaaaggaagtcgacacactagaaaaagatttggggagtactcagggctcaggaagaggcagagttggaagcaaaatgcaaggaaatcatatgtaagatttgtagcgtggaagtgaggaagcaatgagaatcaaagggaaggaacagctaggcaaaccagaaggacaggaaaactggcttcacaaccaaaaagaaatcgggatttagattataacggaagaatgggaggaagaaaccaacagatttaataatgtatgtaaggaccaagtaccttacacacattattggtcttcctacagcaacttccaggaagttgctattgtactgcccacactgcgagtaagggaaggaatacgaggctcaagtaagttaagtgacatgcccaaagtaaccccgctattaaatgacagccaacactggaacccagggtcgtctgaaaagatgaaacgcaacaattcaaggaggaactaagagtgtgagaggaaccaaaaacgaagagacatgtactggagggaaccaataaagaagggacatgtgtggagggaactgggaaaaatcggacatcaccagggaccctggctctccggcgagctagatccccccgcccgcccggccgccagcctgcgcaggaacgcgctcgcggcatgcctcagccgcgacaccacctcgagccacccccacagggctcctacctccctgcaatgcgagcggagggatgcacagcctagccctccctgcctgtcaagggcacgcctgtcgtcacttcctcggggggggacgtacataacgtcacttccgggtacaggcaggcggaagagcgtccctctccaattttttttttttttttttttttttttgagccagagtctcgctctgttgccaggctggggtgcagtggcgcgatctcggctcactgcaacctccgccttccgggttcaagcgattctcctgcctcagcctcccgactagaggcgcgcgccaccacgcccagctaatttttttatttttagtagagacggggtttcaccacgttggccaggacggtctcgatcttttgacctcgtgatccgcccgcctcggcttctcagagggttgtgattacgggcgtgagccacagcgcccatctgtccctctccaatttgaggggcgtctgggattttccgccaatgggaatggcgggctgaggcacagttgaaggggcggggcctcagctacggaccggaagcaatgggcaggccgtcggggaacggattggaagaggcgggcgggccctggtctgggcgaaggcgggggcggggcggggcggaaacggaaggggtgggcgggccctagaggagggaccggaagaggaggtgatggagcaggggtagcaatggagggtacttaagggagaaaaggcagttgagaagtccccgtggttttggattttgcaaactcttgttgctttattttatttacatatatttatttattaatgacagagtctcgctctgtctcccaggctacagtgcagtggcgtgatctccgctcactgcaacatccaaatcccgggttcaagtgattttcctgcctcagcctcccaggtagctgggattacaggcgcgcgccaccacgccgggctgatttttgtatttttagtagagacggagtttcgccatgttggccaggctggtctggaactcctgagctcaagtgatccgcccgcttcagcctcccaaagtgctgggattacaggcgtgagccaccttgcctggcctcctgtttataactggcgctgtccacttcctacagatgttgacaggttctgtttctccatttaatatgtaaagctaagctcctcaaaggcatgatgccctttatatgtaaaagaactcaaccgggagtttaggggccatcctttaagtggccctcgtctgtgtccgcctaaaggaaaacaaatgaaaactgaggcgagcctaatttaagcagggagtttttttgggtcaagttcgaagactgcaactcggagcagagattcaagttgtcctgaatatacactcggattagcagcagctgaaagagcgtttttaaaagaacaggcagtttccaaattgttgatcaaagttttttttttttttttttttttttttgagacagagtctcgctcttgttgcccaggctggagtgcagtggcgcgatctcggctcactgcaacctctgcctcctgggttcaagggattcttctccctctgcctccccagtagctgggactacaggcgtgcctcaccacgcctagctaatttttatatttttagtagagacggagtttcaccatgttggctaggatggtctcgatctattgacctcatgatctgcccacctgggcctcccaaagtgctggaattacaggcgtgagccactgcacccagcctttttttttttttttttgagacggagtcttgctctgtagctaggctggagtgcagtggcatgatcttggctcaccgcaacctccacctccagggttcaagggattctcctgcctcagccccccaagtacttgggattacaggcgagcaccaccacacctggctaattttttatatttttggtacagaaattttatatttcaccatgttggccaggctggtctcgaactcctgaccttaagttatcgctcgcctcggcttcccaaagtgctgggataacaggcgtgagccaccgcgcctggccgccctgcccatttttgtatcggttttctgtgtctctagcactttcttttccacagccacctatcaatcctattcagcacttccacagtattttctagagagccaattttcctgcctaattcacattctgaatttcacaggcggaccagtcctgtttgtccttatgccatagtcacttcaccctgatcggcctcaggcttctcatctgagcaatgggaagaatgcctttctcatagctgggctgagggttgcagtagagacagaatccacatcattgctgcctgatgactcctgcagggaaagcctgagagacacagagaaggctgagctctcggcgcgctacaaaagggctctcagctacatggtggctcctctgtccagctagagctgagctggcctgggtctggcttagtcacaagcaggctcagggcacagctgagaggcaaagggaaggaagccaggactggcagcctgggctaagggtaaaacttctacctcctaccaatatttattgcagtgtttttcaaactgcaggatatggacgtcagtgggtttgcaaaattaatttagtgggtggtgatctgctttttaaaaaaacaaacatggtgccaggcgtggtggctcacacctgtaatcccagcactttgggaggccaaggcgggcagttcacttgaggtcaggagttcgagaccagcctggccaacatggtgaaaccccatctctactaaaaatacaaaaattagccaagcgtggtggtacacgcctgtagccccagctactcgggaggctgggcaggagaatggcgtgaacccgggaggcggagcttgcagtgagccgagatagtgccactgcactctggcctgggcgaaagagcaagactctgtctcaaaaaaaaaaaaaaaaaaaatagctctaaggtcttgcactaaccggtatgacctgtctggcgtctttacaggcagtattggaatgttatagggagacatacagggtttaagaaatccatcacggagaagaccttcaattatcaattataggttttaaatttacctcggctttgaaaggaataggatacattgctttctctttactacttccccaggggtttgtaatttaacatgaaactgagtaatctgtaactttcctcgattctcgtcttttgaccataccttgggatgaatgagttctttgtctgtggtggggagcaagtttagggaggggaggaatcttccctgattaatatagaggcctaagccaaattttagcattaaatctctctaataggtttgttcctgcctctggaataaacagaaatttaatattagctgatttgcttttatatatgacttttgttctttttcccatttgggacattttcttttgaagtgacctatttttaatctgaaacatttattttgtcctctttctctccctttgcctctccctctctgcctctttttctctctcactctttctctttgcctctctctctgcctctctcttcctctttgactctctccctttgcctttctctctgcctctctctttccctttttgcctgtctctctctctttgactctgtctgttctgtcagtctttctctctcctctaagttttttttttctttacttttgagtctcctggctttactctttcatactctatatattgcctggagagtgggggtctaggttctttttttttttttttttttttttttgagacggagtctcgctctgtcgcccaggctggagtgtagtggcgcgatcttggctcactgcaacctccgcctcctgggttcacgccattctcctgcctcagcctcccgagtagctgggactacaggcgcccaccaccatgcccggctgcttttttttagtagagacggggtttcaccgtgttagccaggatggtcttggtctcctgacctcgtgatccgctcgccttggcctcccaaagtgctgggattacaggcgtgagccgccgcgcccagccctcagtctaggttctttataggttctggccccctgggtactttgttgtatggtagacagcagaatttttgccttctgcttttgtttttcatcatcttttcttatatataccttttgggcttctcttagaagctcttctataggtttatctttccagttctctatcttttgtaatttcttgttaatatctggccaactgttagtgacaaaatgaagttttaacattccctgcccaagaggatccttgagacctagaccagtgtattttctcatttgttcctttaatctatctaaaaattctataggcccttcatctttcccttgctgtatatcaaatattcgggtaagatactgagttcggggtaccaattttttttttttttttgagatggagccttgctctgttgctcaggctagagtgctggagtgcagtggcgtgatctcggctcactgcaagctccgccttctgggttcacgccattctcctgcctcagcctcctgagtagctgggactaaaggcgcctgccactatgcccagctaatttttttgtattttttagtagagacggggtttcactgtgttggccaggatggtctcgatctcctgaccttgtgatctgcctgcctcggcctcccaaagtgctgggattacaggcgtgagccactgcgcccagcctcggggtactgatgctttaatcccctttattatcaattccttaaggtcctgcatattttctcggtgggctgcgttgttattgtcccactgggggtcttgggtgggagttttttgatctgctgtaggaacgttttggccaggagggtgttcgtgttcctaggctcccatagcagctctatggatcatgtctctttcttcccccgagaagaggggaaagggaaattctgaatatcttttttacattgctctatctcacgttgaagtcctttaagggaaaggtacttaggtcggtagtgagtgggctcttgggacgattctcaagaggcagggttgtaagaaaggggacatcagagataggagaagggtctgggacagcagctgcttttgtttttggtcctttcattatccttctaacattttaacattaggcctgggggaatattactgttgctagctttctcctttttatctcttaccttacttggggcatttcccatcttgggtcctggttaagctcaatctcccctgttggagatgtctcgcctatcctttagccccacctgctggaggctccttgcattcatgcacactttcaacccccagaatatcctgaccaccaaggaaatactttgtcacccctgcgatgtttcttagcttggtctctgcacacttacttggtcgctgtggtacatgaggatcctttcccccaggtcgccagcccgtttctttctgccttgctgagagtataggtttattcgtcacactggttggtctcgattccttacccctgtggccaccgcaacaaggcagtgggacgtgcctcctcatgggagaggtctagaccctcctcagaggaggatgggaatcccaaatgagaccccaaatttgttagaaataaattttcagtgccacaaaagaaatagcactcaaacatacattttctcagcaaggcaattttacttctatacaagagtgcgtctcatggatggtgcaatggcgagagcacaccggaacaagggaggggaatgggttcttatccctgatgcaggtaccccctactgctgtgttgttcccctatgggctagggttggaccgcacaatctaagctaattctgactggctattttaaagagagcaggggtataagccagagtggtggggtgagaagtttagacaggaaagatggttacggaccaggtgactaaaggtgactcaggtcagagcaggtgacagaggctaggaggggattgtttactgaaactaggggcaaggagacataaagaatgaggaaattaaaagttaaaatgaagaacaaagaacaggtgagctgaacatactgatacattggttctttggagaggatctcagaactcaatgtacttaacaaattacaggctaaaacctttgaagaagaatttatgatatcctacattatcatggggtaaacaattcgtccctgacagaataaggctactggagttctcttcttgtaactctgggaaggactagagggaactgtgtctgcagtggggccaggtagttaaaaagtctggactgggccgagcgtggtggctcatgcctgtaatcccaacactttaggaggccaagacaggtggatcacctgaggtcaggagttcgagaccagcctggccaatgtggtgaaaccctgtctctactaaaaatacaaaaattagctgggcgtggtggcaggcgcttgtaatcccagctacttgggaggttgagggaagagaattgtttagacccgggaggcagaagttgcagtgagccgacatcgtgccattgcactccagcctgggtgacaagagcgaaatccattgcaaaaaaaaaaaaaaagaaaaagaaaaagtctggaccaagccaagaggggaagaggacgtccccatgaaagagctttggatccagaaagcccgggttcttggaattctttttctcttttcacttttgttgtagcatactttgttcttttttattttttatttttttgagatggggtgtgggggctttactgtgggtcttgctttgtcacctaggctggagtacagtggctcggtctctgctcactgcaacctccacctcccaggttcaagcaattctcctgcctcagcttcccaagtagctgggatgacaggcatgctccaccatgcccagctaattttttttaccgttagtagagacaaggttttgctatgttggccaggctggtctcgaattcctgagctcaggtgatcggcccactttggcctcccaaagtgctgggattacaggtgtaagcaactgtacccagcgcatgttttattttaatttaatttaattaacttattttttgagatggagtttccctcttgttacctaggctggagtgcaatggcgcaatctcggctcactgcaacctctgcctcccgggtttaagtgattctcctgcctcagcctctccagtagctgggattatagacatgtgctaccacgcctggctagttttgtatttttagtagagatagggtttctccatgttggtcaggctggtctcaaactcctgacctcaggtgatccacctgcctgggcctcccagagtgctgggattgtccttggaattctgagtggatacatgaagagttagtaagaaccagtgaaaaagcaatcacttatgatcctgggctttgaaaaatcactgtgattatcttatgcacttacaaatgagactaagacgcctgatgggaaagtgcagattgctggtgaggaagggcaatgaagaagagactaggaaccaaattcatcatcattatcacacaaaggcatttggaaatgtcaccttacacatggtgagcacatatgggtgccagcccgagacagcaggataagtttcacaaaacttgaccaggcaggttagaagcaaggcatggttcaggatggcagagggcagggagacagaagggagtaggatgggagagaagagccagctggaagatgagtcagggggtgcaactggggagagcagctctgaatcctgcttctcagtgagaaagttgctaagatggctttgcagggagctgtcctatcgctgctcgagatcagcctgctgggcctatgatgataagcagggctgaccctcttgggctctgtagctaagcccaaaccctgctgaaaatggggcggggaggttgaggcagtgtgtggcaagtgacacagacggggactcccagctgggggtccctggaattacttgacatcccacagctggtgtcttcagcagtcatctggggcaacaatcccacctgcccattgtggttgttgaggatatcagagcttttgttttaaagcgcttgccacaaactcttaagatgcggatgggtttcccctgtgaagcactccacaggcgggatgcaggcccatctgaggaggggcttggaaggaagaggagcacttgagacggggcagaactgggctggcctggggctcagcgacagctccattgcagacaaactgggctggggaaggcagctcccacctggcagaggatgcccttctgccccctgacaggagggaggagaccaccgcatccccgactttcagccctcacgtgccatctggtggctttgctgcagacactgccatgatctgagtggtctttggcaatcacgcattggcgggagtgtgaggttgcggggaaagagggactgaccatgggcctaggtggggaggcctggccactgtgcccacagcttaggaagggacagtcagagctcctctttgttgctatcgacggactgagccagaggccctggagccaggggggaacctagtggctcttggtcgccaagctgctggctgctgtcctccaggcgcctgcctgtgggggcatagtcccgcaggagcctgctctccactctgtgctgccaaaggctctcggtactcacgagtccctgcatcctcaggtacccctgctggcaaaagggtggcaacttctggcgcgtgagggcgaacaggaagcaggactctacacaaaagcaaaatgaggagaatgagccaggctgggacatgtggggaggggtgcagaaaggggagctgccaatgccaggtgtgggggcttcactgcaggccttgcctggtatcttccatcccttgaaactgggagctgacctttctgggcatctcacgtccaacctgagtaggtcatgaatcatgaccctccacgaggctccagggcagggggctgccttgacactctggaagaacaaggctccaaaataaaagcaaaccacagcaatgcctcagctcccagacatcagggctgagcaccgggctctgcaggcaaccacactgggggcggggctccgaccttcatgagcagaccctcggcctggtgcggctgggaactcagtggtcagttccactgtgagctcagatctgcctgcaaagacgcagtccctcaacaacatttgagttgcaaataccatgtgcaaagttctgatctaaacagtgtgggggataaagaaaaacgggtatatcctcatctgtcccacaacagaaagctggtgcatgaatcaaatttggtcaatcataagatagctgtggatacttatcatgtagaaatatgaagaaacggccgggcgtggtggctcacgccttaatccgacaactctgggaggccgaggccggtggatcgcctgaggttaggacttcgagaccagcctggccaacataatgagaaagaaaccccgtctctagtaaaaatacaaaaattagccaggcgtagtgacaaacacctgtaatcccagctactcgggaggctgaggcaggagaatcactcgaatccaggaggcggacgttgcagtgagccaagatcgtgccactgcactccagcctgggtgacagagactctgtctcgaaaaaaaaaagaaagaaaaagaaatatgaagaaacaaccaaaagaagccatgcaaagagagaagctactgaaaggaacaaccgctaggtctgggagttcctcgtgggaatgagaatgaaggtagggaaagcgggtgacatagtttgggtctgtgtccccgcccaaatctcatgttgaaatgcaatctctaatgctggaggtggggctgctgggaggtgactgcatcacaggagtggtttctttttctttttttttcttgaggcagagtctccctctgttgcccaggcaggctggagtacagtggcacgatcccagctcactacaacctctgccttctgggttcaagtgattctcctgcctcagcctccccagtagctgagactacaggtgcccgccaccacgctcagctaatttttgtgttttttaagtagggagagggtttcaccatgttggcctggcttgtcttgaactcctgacctcaagctatctgcctttctcggcctcccaaagtgctgggattacaggcgtgatccagcatccagaaatagatgctgccatgcgtccatacagcctgcagaactgtgagccaattaaacctgtttctttataaattacagtctcaggtatttctttatagcaatgtgagaacagactaatacagtgagaaaaagtcatttagccaagtacttataagactttaaacaaacagaagagctgacacagatatgggctcagccttctgagggagttagagacaagggcagacagagtgtcaggaatgggctggagtccttctgtaactctgagcgagccttcttgcctccctgagcccctctatctcaagtgaaaaatgggcacagcacaaaggatgtcgtgaggcttccatgggtgaccaggctgaaaggtgctccagaaatatgacttcctgtttatttctgactcttagcatggaggcccctgggaggccaggccatggcaagcctctccaagcgggtaagagagcagatgaggaagaggacagcgggaagactgggagggcagcaaggtggctgtttggcaggcaccaccttctgacaacatcatcccttctgcagggggctcagatgctcagcagaatctggggccagcactaacagctgcacatcagctacagtaacagagggacggctgccactatgccagctggccgcctgctgggcggattctctccagtccaaggcagcagcacacagtggcctgtacagtcaaacagtgtctagaaagtgggagacaggaggctaaagggcctgggacaatgcattggtgggacccacaactcagggtgggaattcactccctcacacaccctggcatttttgttgttgttggttttgagatggagtctcgctctgttgcccaggctggagtgcagtggcatgatctcgggtcactgcaacatccgccttccgggttcaagcgattctcctgcctcagcctcccgagtaggtagctgggattacaggcacccaccactgcccccagctaatttttctacttttagtagaaatggggtttcaccatgttggccagggctggtctcgaactcctgacctcaggtgatccacccacctcggcctcccaaagtgttgagattacaggcgtgagccactgcacctggcctaaaagtgtatttcttgagaaggtgtgcatttgcttctgtgatttctatagctcaatgatctcatgaagtttggccccaaatttacataagcagggcctactggttgaatattttcagagatttttctctcccactctatctagggccaaaaccatgcatgtcatctatctcctcctttggagggttttggctcccagcttccctactgagatccaagctttattggagtgtctctaaacaggcctcccatcctgctccagctctgtcttcccacccatacctggccctggcgccttcccatggcgcctggccctgctaatccttttgaaaagacatattatcagctgggtgcggtggctcacacttgtaatcccaacacttcagcaggctgaggcaggcggatcacgaggtcagttcgagaccagcctggccaatatggtgaaaccccatctctactaaaaaataaaaaaattagttgggcatggtggcatgtgcctgtagtcccagcttcttgggaggctgaggcaggagaatcgcttgaacccgggaggcggaggttgtagtgagctgagattgcgccactacactccagcctgggcaacagagcgagactccatctcaaaaaaaaaaaaaagaagacatattatccattatttttaggtgagttgtaatttaacccacggcattgtcgggaacagtagtctggggtttggatttccagatatgggtcctgaaactccacgggtcttgggtctctgtgacctttcttcaacctggagctcagaccctttgtctttctgggagcttaagttacctgcatagaagcttcgcaaatcggtgtccaaacagttctccaggaagcgcctcagaggtaggatgtgcccgatcggggcagtccagtctgttaagaagtcttccacgatgtgatggatggccgtgggccgaggcaggggccagtgtgcagggcggaacctcacctcctgttctgtggggaggagagagggggccatgtcagagctgtgaggctgggcttcccctcctcgggccgacacagcacggatcccacacagcccaaacacttccctcgttcactcgtgctcggctttcccgacagcctcctatgctgggctgtggtcagactgttcaagagccacctgcagatatttgaaaggctgccatgaggaagaggaactaggcttttcccttgtggtttcggaaggcagtgctgaagctaacaacgtgaggctggcgtttccctaagactcacatggactgagatctactgtggctgctttttattttgtattattatttgttggagacagtctcgctctattgcccaggctgtcatgcagtggcacaatttaggctcaccgcaacctctacctcctgggttcaagcgattcttgtgcctctgcctccagagtagctgggattacaggtgcccgccaccacaccgagctcatattttacatttttcgtagagatggggtttctagtctctaccatgttggccaggctggtctcaaactcctgacctcaggtgacccacccgcctcagcctcccaaagtgctgggattacaggcatgagccactgcgcctggctgtggctgctttcaaactggcctttctctgagaagactcagatagaggcgaggggtctcagcactcatctagttcagcttctccctggtgtgggctcccttctgtggtgttccagtcagatggccatcgagtcaagacttggccgtcgctattctgggaaacctgaatttggaggtgaccaattcccccactgaacagctttaactcttagtgcctcctttttctttttttttgagacagagtctcgctctgtctcccaggctagagtgcagtggcacaatcttggctcactgcagcctctgcctcctgggttcaagcgattctcctgcctcagcctccctagtagctgggactacaggcgcacgccaccacgctggctaatttttgtatttttattagagacggggtttcactatgtcggccaggatggtctcgacctcctgacctcgtgatccgcccgcctcggcctcccaaaatgctgggattacaggcgtgagcgaccgcgcccggcctttttgtttgtttgtttgttttttttgagacagagtcttgctctgtagcccaggctggagtgcagtggtacaatctcggctcactgcaacctctgcctcccggatcccggttcaagcaattctcctgcctcagcctcctgaatagctgggattacaggcatgtgccaccatgcccagctaatttttgcatttttttcatgtttttttagagatggggtttcaccattttggccaggctggtcttgaactcctgaccttataatccgcttgccttggtctctcaaagtgctgggattacagtcatgagccaccatgcccagcctcttagtgcctccttatactgaccacagacctgcacccgtcactgctacctgctgacacgacttctgcctttgggaacaacccctgtttaaaccaccctcttctacctgactgcccttcaagctctgaagcagggggtgcgttcccgaggttgttcacttattggtagctactctgtgcctgcagtgggctggcattctgtgtacactgtcaggtttaacctcatggaaccctacaagaaaggtactgttgtaatccccattttacagaggggaggttgaggctcagagaggttaagtaatggtccaaggtcacacagtgacaaaatgacaggcctagggattttgcccagtttctctgtactgtgttaaccagctccagttccctctactcttcagacccctcccgccccaccacagtcagccgcctctggagacctgcagcagggccgtgtccctcttactacacagtgcctggcggagagcacgacaccccccgcatggcctgtgccagtcacggtatgtgtcagaatctggaagcatcgttcatcattctcggaccttctgcccaagtggtctctaggcagagtcccgcagccatcccacctgtcagctgagcatgtgtgtgaaggtttcagggtgggtgacaaccttgcagacggtgaggtctgaggagcccacaggttggggaagggcagagacctgctcaccggtggggaggtatctatagtagtagatgacaggatgaagaaagttagactgccaggcatcttctgtgtgccccacagaccggtcatcaaagaagacgtccttgtcggggccagagaaatttctgccatattccatgttgatgacgaagagcccgtgctttgccttcctccctgtgagtgtctccagctgggccagcatctgtatggggaactcctccaggtactcaaaggccgtggaattcctgggagaacagcaacgcgggggaggccctcagtgctgtggcagaggtgaggggtgcagcccgggggtgagcatgtgtgtgtgcgtgtgtatctccccctctaaggagcgtcaatcaagcagcacacccctcacttaacattactttttcagctcagctctcacgcacatgtggggtagagaccagaaaattccatgtaacctgaatgggatatctggggaaagagtgtcccaggcagagagaacagtcaggaaaaagccctgaggagtatgtgagcactttgtgttcaaggaacagaagaggccgacgtggctgaggggagtgaacagcaggcagagggcaggagagggggccggaggccttgagaggtcaaggagggctgcgcctcccatgacgagacgtgaggagtcgtctggcccgagaggtgacactgctggttgcttgggaggactgagcagagctgggatcagcatgcctcaggtttctaaggaccactctggttactgtgctgagaacagacgccaggccaagtggggcggctgttgtatgggtgcaggtgatacagcctggtgatcgggaccgaggtggtggtggtagagcaggtgagagctggttgggctccagacatcatctgaaggcagaggtgacaagacttgcccatggtttgcatgtggggtgttgagacaggggtgccaggcgtgctgactcacgcctgtaatctcagcactttgggagaccaaggcgggtggatcacctgaggtcaggagtttgagaccagcctagccaacatggtgaaacctagtctctactaaaaatacaaaattagccaggtgtggtggcatgggcctgtaatcccagctactcgggaggctgagacacgagaatcgcttgaacctgggaggtgggctgcagtgagccaagatcgcaccactgcactccagcctgggcaagacatagtgagactctgagtcaaaaaaaaaaattagccaggcatggtggtgggtgcctgtaatcccagctacttaggaggctgaggcaggagaagtgcttgaacccaggaggcagatgttgcagcgagcagagatcgcaccactgcactccagcctggatgacagagcgagactgtctcaagaaaaaaaaaagaggggcaggggcatggagggtgatgcgagggttttgtgcagaaagcggctgcactacctgcatgtccctgaacttggtgtgctatagcacgccctgcctttggatcgggctgttccctctgactgaaggttgctcccttgcttctccctgccacctgtctccccccgcccctcacccctctgtgctctgcaccgtttccttctcaggaactgtccatcctctgggatctgctgcttatcactaaattgactctgacgatggtggccggcaaggccctggcctgagggagctctgagatccacgtggctgcctctgactactgctcatccacgtgatgccaaacactttccacaagtgacctttactccttcctttactgctgcaaggtaggcacaattatccccattttgcagatgaggaagaagggctcagagaggctcactaatgtgcccgtggccactcacaggactgtctgtagagttaatgtcattgtttttccccagaacaggcatgttccccacagcagccttcatcttaggaaagaactgggcacctcacacctggaataggaagagaagcgctatgcagcacgtcgggaaagctgggccgaggggagtagggtggggacgggctactcactccttcaacaggatgacatcggccagcacaccgaacatctggtagagcccagaagcctcattcacgcgccgcacgatggagctggtcagctgtgtgatggggagctcagtggcgggccaggtgacgctgtggtggcggtgctccaggagccggtgaacagcacgcactggaacagccagagggaggaacggcacgctgcacttaccattttatctctggtcactgggagggatgcccaggcctcattgacccctgagaacgccatacacactggtctccatggcccagcgcaaacgcctaggtggtgaacacatgaggggaggagatggcagctgcctttagagcagggccagcaggtattttctggaaagggccagacaatccatattctctgctttgtgggtcatacacgactcagtgatgctgctcaattctgcccctagtgtaaaagcggccaagacaacaggcaaaggagtgagcacagctggagttggtctccaggccagagtccatctgcccctgcttcaggccatctgcacgtgggagtcccaccggccccacctcacacaaggaacgtcaagtccaacacggagccttccccagaaacctcccccccttcacagctctgtttccatcagagacgcgcctacagaaatctttgatttcgccctctctttcacagcctaaatccatctgtctctaagttctttttttaaatattttttattttatttttttgagacagggtctcgctctgttgcccaggctggagtgcagtggtgcgatctcggctcaccgcgacctccgcctcctgggttccaggaggaaccgactcccagaattgagtccaatcctttgcccgtactgtaagacccctctgcagtggtccctacacttattattgtagtcctctaacctggaataaagtccaccttaccgtcttcatttgtattatgatttttgagacagagtctcactctgatgcccaggctggagcgcagtggcacgatcttggctcactgcaacctctgcttcctggattgaagtgattctcctgcctcagcctcccaagtagtagggattacaagcctggctaatttttgtatttttagtagagatggggtttcaccatgttggtcaggctggtctcgaacttctgacctaagctgatctgccagcctcagcctcccaaaatgctgggattataggcatgagccactacgcccagcctgccttactgtctttaaaaagaaaaaagaaatataaatattgaatgtctttgagtggcagaatataaagattactccccgtaattccctacattttcacatttttgatgctcaggctaggcatggtggctcatgcctgtaatcccaacactttgggaggctgaggtgggtggatcgcttgagcttgggagtttgagaccagcctgggcaacatggcgaaaacttgtctctaccacacaaaaataaaaacaacaaaattagctgggtgtggtggtgcacgcctgaagtcccagccactcagaaggctgaggtgggaggatggcttgagtctgggaagtcgaggctgcagtgagccgagatggcgccattgtactccagcatgggaaacaggaagagacgctgtctcaaaaaaaataataatactaattttttaaagctcagctgtaagattatgactccattctttcaaatagactcacctaaccacctaactgaatactgtatgcctcactgagtgaatttcaaccaacaccctgtccttctcagaaggttaaccacaggagcaggaacatctaatttttatttatttatttatttttgagacagagtttcactctttttgcccaggctggagtgcaatggtgtgggcttggctcactgcaacctccacctccaaggttcaagtgattctcttgcctcagcatcccgagtagttgggattacaggcgcccgccaccatgcccggctaattttgtattttaagtagaggtgggatttcaccatactggccaggctggtctcgaactcctgccctcaggtgatccacccacctcagtctaccaaagtgctgggatgacaggtgtgacccaccgtgcctggccacatctaacattttagactcctctccacagaaagggcaccagtttgctttctatgaaagaagagaagacctttgtagaaagtgtctttcaggaaagctcctgggccttggagtttaattcccataatggtgagaaaatcaccaaaactctgagcctcagagttttacactcttgaggaaaatggagatttcacacccacctttcggggtgctggcggccctgccagggtcgtgtgttcagtgctcagcccactgaagtcacccaacatgcgtgaattcatctctctcacttcctttttatttcccatttactcctaaaatcacaagtatcaatttttggttggggattattttagtgcaataaatagaattatgtttttaaaagatattttagtattttctttgtaaacattctcaagttggcagaaaatttatacccttggtactgagagttttgaaaaagaactgatataatccaattacatttttttttttttttttgagatggagttttgctcttgttgcccaggctggagtgcaatggtgcgatctcagctcaccgcaacctccacctcctgggttcaagtgattctcctgcctcagcctcccgagtagctgggactgcaggcgcacgccaccacacctggctaatttttgtatttttagtagagacagggtttcgccgtgttgcccaggctggtcttgaactcctggcctgaagcaatccacctgccttggcctcccaaagtgctaggattacaggcgtgagccattgcacctggcctacacttaattttattttatttttgagaccaagtctcgctctgtcacccaggctggagtgcagtggtatcatcatggctcactgcaaccttgacttcctggactcaagggatcctcctgcctcagcctcccaagtagctaggactacaggcgtggacttttacactttatctgatactttcctaaacatgtcgtcagaccacaaaaacctgttgtcacttccccaagacaatttatgacaatgagctactgacaagcaatcccctaatgcttctggacataggagtagatttataaaccctgggatgctgagagtggttccgtctggggacagttctgccttctcagctgggctcacctgtgtatcggaatccgtggatgaagcccccagcagatttccggtagtccaccgagtggctggcagtacccaggataaacagaccccggcttcctttggattcgtagctagctcgaatcagcgggtacttcttgccgaatgcatttcccgagttaagtctgagggacctgtcagtggaaagggctgttcatgaaaatagctgctatgtaagaggcacttatttatttagttagttttgagatggagtttcgctcttgtcgcccaggttagagtacaatggcgtgatctcggctcactgcaacctctgcctcctgggttcaaactattatcctgcctgagcctcccgagtagctgggattataggctcctgccaccatgcccagctaatttttgtatttttagtagagaccaggtttcaccacgttagccagcctggtctcgatgtcctgaccttaggtgatctgtctgccttggcctcccaaagtgctgggattacaagcgcgagccactgcacccagccaggaggcacttattacagtggcacttattactggcactgagtgccttagatttctcgtctcatttaaacctcaccatgaccccaggaggtgggtattatcatctccatttaagagatgaagtcggccaggcgaggtggctcacgcctgtaatcccagcactttggtaggccgaggcgggcgagtcacaaggtcaggagttcgagaccagcctggccaacacagtgaaaccctgtcgctatgaaaaaatacaaaaagagttagctgggggtggtggtgcaatggctgtaatctcagctactcaggagactgaggcaggagaatcgcttgaacctaggaggcagaggttgcagtgagccgagattatgccattgcactccagcctgggcaacagagtaagactctgtctcaaacaaacaaacaaacaaacaaacaatgaagtcaggccaggcacagtggctcacgcctgtaatcctagcactttgggaggccgatggaaaggagggtctggacaggcacaccagcttctcctttgtctttctgcaccctggtcagaagacaagtgaaagactggatgctgctttgataccaaacctcccgaggtagtcggcagcaatgtttaaaatctaggcttcataaaatagcccttcaaaatacaatgataaataacttaagcaactaacattttattgagcacataatacatgccaagtactttctttattttaagagatagggtctcattatgttgcccaggttggagtgcagcagctattcacaggcatgatcatagcacactgtagccttgacctcctgggctccagtgatcctcctgcctcagcctcctgagtagctaggtactcatcactgcacctagctcccagcactttctttcctttctttctcccctctctctccttccttctctcctctctctttttttgtttttgagatggagatcttgcactgtcgcctgggctggagtccacaatggcgcgatctcggctcactgcaacctccacctcccaggttcaggcgattctcttgcctcagcctcccgagtagctgggattaccggcacgtgccaccatgcctggctaattttttgtatttttggtagagacggggtttcgctacattggtcaggctggtcttgaactcctaaccttgtgatccgcccacctcagcctcccaaagtgctgggattacagcatgagctactgtgaccagccatctctttttttttttgagacagggtctcactctgttgcccaggctggaatgcagaggcatgatcttagttcaccacagcctcgacctcctgggctcaagtagtcctcccaccttggcctcctgagtagctgggaccacaggcatgtgccaacacacctggctaatttttgtattttttgtagaggtggggtttcaccatgttgtccaggctagtcttgaactcctgagctgaagtagtatgcctgccttggcctcccaaagtgctgggattataggtgtgagaccatgagccactgcacctggcctctgcacacattcttctttctttttttttttttttgagataagagtctcgtcacccaggctggagtgcagtggtgtgatctcggctcactgcaacttctgcttcccaggttccagcaattctcccacctcagcctcctgagtagctgggattacaggcacccaccaccacgcttggttaaatttttgtatttttagtagagatggggtttcaccatgttggccaggctggtctcgaactcctaacctcaagtgatccacctgtctcggcctccctaagtgctgggattacaggtgtgagccaccgcacccagcctccaagcatattcttatgttaatcctcgcaataaccatatgagaaacaaactttgaatcccattttagacatgagaatactgggccacagcgtggttaaataacttccgccgaggtcacagatttggcaagcagagaatctcaggacaattccggcacctgtgctctcagccactacgctatattgccttcgagcaaattcccctctgtattctctctgagccggcctttccaactcacaggtggaggctcccaatgctgatgaagatctgctggtgttgctccaggaccaagggcctcagggccacctgggaccctcaatggtcagagctcatgtcctggagggaaatcaggcagcactcacatccattctttgggtgctgtcctgagagctctgtcgccagcctactgaacagccaccctgttcccctagggaggggtcaggagggtttgctaggagagcccacctccttccgcatggaactcacttattgaaaatggagaagtcaaagttccagcccaggcagcggattacccggtcatagggcacgcgcatggcaaagttgtcattgtcgtcctgggggagggtgatggagtcggcactctggttggtgttggcttcttccaggaagaatttcggggtgacatggaacttgcctttgctgtccttcaggatggccagatccgtcaggtcagactcgagcagcccgtccagggacttgagctggtaggtatccagcaggccattgttgatggctctgagcccacagagaatgcaggggagagagactcagaggaaagctgggcagtgcagctggggtcaggaagggcaggggagggttggggaggctctttccacactctgggctcccagcacagaacacacatgcggggatgtggcctacctgaggtctccaacgtagtgggtggcccaggacagacggacccgggagcggctgagcatatggataaagtttgtgacacccaagatgttctctgctgtctcaaaggccgagttcccacgacccaggatcagcacattctggcctacaaagtcctcagggtccacggacacggactcgtaaccctctgcatattcggagccagggaagtcaacctggttggggactgataaaccagtggctacaaagaggacgctgcaggcggggacagaggaaagatggcttagtctcttagctataagaccactaagtgaaaaccactccctggacccacccacccacctgcctggctccaaccgccggcccctaaaagaaaataggacattcattcattcatttttcattcattcatctgtttacgccctcatcccagtgcacttgagaggctctgcccttgcctctccctgagctcacagtattttccctagcactgtactgggggttaaatttgccctgtgagagaggagaagatgacagtatgagaaatggagaattcacctaactttgcacatagcagtcagaccaggtatgactgctggtgatgaaatgaaacctgacattctactttcccctttctgagtcctctgacagatacatctatccactgagcagtaattctgtaccaggccctgtactaagtgtatctgtgcaccatctttctgactcctccaagcaacctggaggtggtatgtggcctgctttacaggtgaggaggcacaggccctgcaggcccatggcttgagagctcctaaaagcagcagagccagagtctaaacacagataggcttgattccaaagtcctgctccttccattggtgaggatcgccatccaggggagggcagctggggacttggatcctgccggcttgcagaagaatgctttgatcacagagtggtttcaaaaatagaattgaaggccgggtgcggtggctcatacctgtaatcccagcatttggggaggctgaggtgggtggatctcctgaggtcaggagttcgagaccagcctggccaacgtcgtgaaatctcatctccaccaaaaatataaaaaaattagccgggtgtggtggtgcttgcctgtaatcccagctactggggaggctgaggcaggagaatcgcttgaactagagaggcggaggttgcagtgagctgacctcgtgccattgcactccagcctgggcgacagagtgagactccgtcttaaaaaaaaaaaaaagcgaaataccctttttcgtccattcctcccatacctactggccaatcaaggtgtgtggttcgtgtggggaaggtcccagcttccgcaggtgagctctggcaccggccttacctgcactgatgcacctggcccttctggtcagttaggatgaagtagtggccattccaggcctgtcggtccttgtccagagtgacgtgggcgatggtggtgttgtactggacacggagccccagcgtgtccgcgaagtcacccaggtagcgcaccatgtcgcgggcgtcggggaagtaggcacgcgagtagtgtctgaagagcagccgggggtcgtggctgagcagagagttccagtcgtggcggaggttgaactcggcgttagccttgcccgtgtaccgcttgttgatgctgatgagcttgcggtgccgcgggtagcgtgtgaagaagctgccgggccgcggggcccgctcgaacactgcgtagtcgcgtccagcgcgctgcaggaagtaggccatctgcaggcccgcgggcccagcgcccagcacgcagtagtcccggcgcgggggcaccgacagcgctgggtgcagggcgatggccaggagcagccccgggggaccccacaacggggccgcagcggagaggcccatcctgcagcagatcagaggggtaaggcctcgcacccggcccggcggctgggagacacgaggcccagaaagaggcggggcctgcgggaactctcactgcaatctgggtcacggccaggcccagaagccgtcctcagagctcatttgcccggactccaccgtttcaagctgggacttggggctccccggaatcccgagcccctccatcttatctccctcagggtctccttcctcaggggcaccggctccccgcttatgattgtagtaacctccaccctggggaaggagagcgtactccccaattttcccctaatttgagggtgcccaacacccctttgaaccaccctccaggttggaccttccagaggccttggcccctctccagcgaccgggtgggagcctgaagtgggtgtggcctgcgtgcgccccgccccctgccagggtccgcgcgccccaggctcttcggccacgtgacagggatgccgcgcacacctgccgcccgcccgcgtgcgcttcaggagccgccaggtccctacgcccgcagctccggcctccccgcctccgaccgaaccctgagaaacgcgcgaacctcccagccgctccggctgcaacccgtggtctaatgaggccgcgcttggctcgcttgctccgcggcggctccgcccctcgcgcccggaccaatggcagggggcggggtcacgtgcgcggcgcgcggcacgccgggaccagctggcaggctgcctgctccggcccagcgcgggagaggcgcgcgcgtgctgcgttcgctgctccgggggctggtagaggggcctggggctagcgcgcacccgcgagggtggaaggtctggagatccgggatggggaactgggtccttcgttttaaaaggtgcctctctacacggagggaggggagcacgtgatttttggagctaatcctagctctcatattccatgaatgtagccaaacgctaaaactagttggcctacccagttttgtgggactggaaaccagcgtggtggagccaggaccgataagccaattaacaagcgtttgctacagtgactcagtgtactgcttaccaagtaacatacacgactgtcctaatcttccaccaaataggagaggtgggcaaggcattgtttccgacatttggtagctgactggtcaaatggagacatagggatgaagggatatgtttacaatcacaggaagtggagcctggaattaaaactcagtggaggcaagataaatggcaggaggaagataacgtgaactggatgatgaaggttggcttcccaggggtggcaagtggcccctgcatgagatttacatggggagaaatacgaagtcagtgtaggaaccttcaaagtccagtgaaatggggctgagtgttcttgggggaagggcaggtggaaagaactgcgagcctgcagatttgcatggctggagattctttgaattaaaaatcgtagctggggactccttagaaaaattttcctgacctctcaggcctacaagtacctaccaaagaatgtcatttactttttcttttttttttttttttgagatggagtctcactctgtcgcccaggctggagtgcagtggcgtgatctcggctcactgcaagctccacctcccaggttcacgccatttttctgccccagcctccctagtagctgggactacaggtgcccgccaccacacccggctaattttttgtatttttagtagagacagggtttcactgtgttagccaggatggtctcgatctcctgacctcgtgatccgcccgcctcggcctcccaaagtgctgggattacaggcgtgagccaccgcgcctggccgaatgtcatttactttcttcagtctgtgtcaacatcagagaaaagctccctcagagcagaaattgtccagtatctgacatacggaagtttaagcatttgttgaataagcattgcaaccagagaggtcaggcagaatactttgccaaaaataaagtagggatgtcttatttcttctttttgagacagagtctcactgtcacccaggctggagtgcagtgacacaatcatggctcactgcagccctgaccttccaggctcaagcgatcctgcttcagcctcccaaagtgctagggattacaagtgtgtgccatggcccctggccaatttttcaaaaaaatttttgggggcatatgtgtatatatttatggggcatatgagatgttttgatagtcatgcaatttggggatgtctgtttcttagtggttgtgaagattatgagaatgggtgctggcaaacaagttcctaaaataattgctggtcttatgtggtgaatacagtagtgggaaattaaacagaattcgtcaagtatggtagggccctacgagtaggctgaacctagattgtaagcaacaggatgctactgggagtttctgaatgtaggattactgcagcagtcaacttggtagccccatgcaggacagataaaagcagtggacagctactcgggaggctgaggcaggagaatggcgtgaacccaggaggcggagcttacagtgcctgagattgcgccactgcactccagcctgggcaacagagcaagactccgtctcaaaaaaaaaaaaaaaaaaaaaaaaggcagtggaaactgatgcaaagtattttcagggaatgagcttgagtcacttccacttgcttctgttaatcctgttggacagggccatggtttgcaagaggcaatttggtgaatactggtccaacctggaaacccccggcactagtcacaccactttaatctgttttttaacactctgtattcacattgaaaactccccaagtacactttttctctccactgcttctaacacagttcaagaaaccttttgcttgctgaggttcgattcattaaaattaattttgtgttttttcaagctactttaaaaaaaaaacctgtaactttagaaatgctgagctttttttgagagtctctgtaatccaaattggagtgcagtggtgtgatctcagttcactgcaacctccgcctcctgggttcgagtgaatctccagcctcagcctcccaagtagctggaattacaggcgtgtgccaccatgcctggctgttttgtatttttagtagagacggggttttgctatgttgctcaggctggttttgaactcctgacctcaagtgatccacccacctcggcctcccaaagtgctgggattacaggcatgagccactgcacctggcctttttttttttgataaagggtctccttctgtcacttaggctggagtgcagtggtgtgatcatagctcactgcagccttgaactcctgggctcaagcaatcctcccacctcagcctcctgagtagctgggaccacaggtggaagcatcatgactggctaataatttatttttttgcagagacaggccctggtctccctgtgttgcccaggctggtctcaaacttctaggctaaagtgatccttctgcctcagcctctcaaagtgttgggattagaggtttgagccaccatgcctgtttcctcacctctacaatggtactactcctgccagcatcacagttctgtatgaggcttagatactacagaaagctcagcattaatacctggcagggtaattactccatcaagtgtccagaacagaacagtgtccacttacatagtttacatagcctcggctgggtgcggtggctcacgcctgtaatctcagcactttgggaggccaaggcgggtagatcacctgaggtcaggagttcgagaccatcctgacccatatggcgaaaccccgtctctactaaaaatacaaaaattagccaggcatggtggtgcatgcctgtaatcccagctactggggggctgaggcaggaggatcgcttgaacctgggaggtggaggttgcagtgagccgagatcatgctactgcactccagcctgggcaacaaagtgagattccgtctcaaaaaaaaaaaaaaaaaaaaaaaaagtttacatatcctcaacatgcagagctcttatgacacaatgctttgtagggacaggcctgagtgtcaccagcccaagccaagcttaaaaacaattcataaaccattacacaatcacccagtgggacatccatcaagctctctgtggcagcctccctcaggcgcagcagccccacctcacccacaccctgcttcacgctgtactagtgctctgcactccagctcctcacagtgaactctccaaaagcaacaggtggcccttcacacagccagcaggcactcatgcttgtggaaatggacttcttataacaaatgaggacacccagattctgaattccacatagaaattgctgaatctcatccccactctgtcaggaatctttgaagaaacgactgtaaatcgttaatgcaggcagacgatgagggaaagactaaacagatatatattttatttcatctgctaaatgtcagagagcaagttagacacacattccactaagcatcaaaggccctcgtagtctcggtggaaggacaaactccagctccacatcactggtttaagtttcttcctctgaaagacacaaaaaatgtaagagaaatgagccaggttgtgtgatatgatgttcactttcctttctgaacctctgctggactgtgcgtgagttttcaacacttccattccgaagttaagcctttcagatgctcacagggctgggcaggtatttccttcagtcaccagctggtggagcaggagagacaactttcaggctatttaacccggagcggagcttttccctctagaccaccggcttcaatctgggacttccctcatcttcctctacctctgccacagtccagccgcttctctaaaacaccgctatcctccccaaccacttgatgtgatctaaaggctctagaagaagctcttggagccaaagtgaatgcttcttcatacttaagtctcagggaattctcgaagttttatcaaggttaaagatcacaatggctacagagcttgctcccgtgctagcccacagatcactctagacctcagaaagtgggctgctacacaccttcttcttcctcttcttcctcctcctcttcctcctcatcttcatcagagctgaaggtgccatcagggaggctgtagacacggatgacctgcttgttggggtccttgaggatgaggtatttgccctcctccagcttcatgcagatgtcaatgacgcagcgtaaaatgccccaggcattctccacgctcaggttgatctggctggcaaactcattaggcttgaactgctgggtgcctaggatgacgtggcgtgaggagtctttcacgtggtaccgagacacataactaacaggggaagggatatcagtggtcagagcagggcagcacagagacagcaacacttgggatcaaatgtcaattaaatggtgatacctggtccactgctattttttcttttttttttttttgagacggagtctggctctgttgcccaggctggagtgcagtggcgccatcttggctcactgcaagctccgcctcccgggttcacaccattctcctgcctcagccccctgagtagctggggctacaggcgcccgccactacgcccggctaattttttgtatttttagttgagacagggtttcatcgtgttagccaggatggtcttgatctcctgacctcgtgatctgccagcctgggcctcccaaagtgctaggattacaggcatgagccaccgcgcccggcagtccactgctattttcaagggaaagggaaaacatcgtcttctgagttctcagttctggatttcattgacaccattgccctagttcaggactccattcagcatgcctgctgtttggcatttgtctcctaactgacccctccatctctaccccacccctggatttatctctgccagtcaattgtccagtacacggggaggggagggtcaacctccctacccagacccttcctttcacaagatcagctgccagctcctgcacaggaatctcacccaagcttgaggtactcagatccagccagcaaagcacagcaggtccaccgggccaacttgtagctgttgttcttcagctccgtggcaatgacagcccctcgctgagagtccagcttctgacgccagtcaacgccattacagtgctgcaggagagccccgttagagaaacagaagcaagctccaaatgcccaaggtgctgggacctcctctggcagagaaggaactccctagtctgcttgcttagaaagtgggtaggtacgcactaaatcttaccatttaagagacaaagacatagtcccttcccttgcacagcctgccgcacagcagtcactcaacgacttacaattcctctcttctaaaagctcgcctagacagggaatgatggatggacacacacggacacacacacacacacacacactttagaagtgtcatataaacagcagagccaagtgtttactatgtgttgcgtggtaaggaagggcttcacagaggacgtgtaacagtgagccaagtggagaatattggctcaagtgcaggtgtagccaggaggtcttgatctgagaggcatggtgggataggaaagacaggcagagttggccttagatgggggtggaagcctgcagtgggtgcaaagctgagtctgacattttacataaatgcacacacagtagaaaaggaccccagagagatcctcttttctacccatatcatttgtagacgtgggaagttggacccagagtgaaatgactggtcaaaggtcacatgacagaggttcccaaactttcttggttcatggcaaacacagggcaaaagaaatactcaagaatttcttttaaattttttttctttttttttttgagacggagttttgctcttgttgcccagggtggagtgcagtggcacgatcttggctcactgcaacctccgcctcccgggttcaagtgattctcctacctcagcctccctagtagttgggattacaggtgcccgccaccatgtccagccaatttttgtatttttggtagatacggggtttcatcatgttggccaggctggtctcgaactcctgacctcaggtgatccactcgccccggcctcccaaagtgctgggattacaggcgtgagccaccgtgcccggccaagaattccttttatttagttagggtcaaaccatgtattagtattctgacaagatgtctctgtgtttccctaaaaaatttaaaatatcctgcagcactcctgtgagtttgctgtggcacattttttggagatggggtctcactatgttgcccaagctggtgagttcaggatttgaactcatgaacccaagcgattctcccacctcaggctcctgagtagctaggactataggtgcatactactgcatacagcttgctggggcatgttagaattcttctcccaatctgcactgctgatgaagcgtgtattggacaattgactggcggagataaatcaaatatagaagttgggtggaggtagagaaatcagttaggagacaaatgtcaaacaggcatgatgaaatggggccctgaactagggcaattatcagtgaaatccaggacagattcagaagacagcaaagccttctattttgctaacagcaaaacagaataatgtaaaaaagaagttggagatgttggaggctcagagcttaggtggaagaaagacaatgctgatggacagctggcccagaggcaatgacgggactggggacacatggaaggggaaggtgttttagcagaaaaacaatgggaagtataataaatcagagtagatttgagaaatcattttcaaagagttcatggttgaggcctgggatgggcagaattctaagatgacccccagtgacccttgcccttgcagagtctcctccccttgactacgggcagaacctatggctaggatcaagtatcacccccatgatcatcctaccttgtatgtcaaaagggattttgcagatgtaaggccgcaaatcagtttaccttaatatacactacctggctgggctcacccaaccgtatgagtctcttaaatctaggtgtagaggtcggagacggaggaagtcagagatctgaagcacaagaaggatctgatgtgctgttgctatcttggagatggagggggccatgtgacaaggaatgcaggtggcctctaggagccaagagaggctcccagctgacaactggcagggggatgggggcctcagtcatctaactgcagggaaatgaactttacccacaataagaatgggcttggaagtggcttttctttcagaacctccagatgagaactcagttctatttctattgacaccatgatttctgccttgtttggatttgtggccccacccaaactgcatgtcaaattgtaaactccaatgttggaggaggagcatggtgggaggtgactggatcatgggggcagacttccccctttggcactattcttgtggtaagagtattcaagagatctggttgtttaaaagtgtataccaacctcccccctctctttctcctgctctggccatgatgtgcctgcttctcctttgctttctgccaccattgcaagtttcctgaggtctcctcagccacgcttcctctagagcctgcagaactgtgagccaattaaacctcttttctttataaatcacccactctcaggcatttctttacagcagtgtgacaatggactaatacaaggaccaagcacacagcactggacttctaacctacaaaaccgtgagctaataaattggtattgttaggccgggtgctgtggctcacgcctgtaatcccagcactttgggaggccgaggcaggcagatcacctgaggccgggacttcaagaccagtctgaccaacatggagaaaccccatctctactaaaaatacaaaattagctgggtgtggtggtgcatgcctataatcctagctactcgggaggctgaggcaggagaatcgcttgagcccgggaggtagaggttgcagtgagccgagatcgcaccgttgcactccagcctgggcaacaagagcgaaactccgtttcagaaaaataaaataaaaaataaaagtaaaatacataaatcggtattaagtcattaagtttctgttaatttgttatggtgcgaaagaaaactaatacaaagttatataatacagaagtatgtatggcgaagagagctgtccaggtgactccactgggatcaaaaaggaggggagccagcaaagacgacatgcaaacggaacagggaaacgggtgagaccagagtaacgcggtaacacagacggcaaaacgacacaggcacgacggccctgaatgctttggggagctcaccaggaaaaatccaagaaaaggccgctggccccagagcggcaaaccttccagtgtgctctttcaacaggtgatgtgggcgggggggcggattgggaggggtggggtggaaatagaggaggaaaagtgaaggaagcatgtttctttcaaggtgcctctgaagagtcaattctgagccagatcttagaatccatgagttaaagaaatgaggaattgcaaaaaatgtgtgaaaagattgaaggcagtggctcagtcaatgaaagaagaggtcaaaaagaagagcggccagacttacaggaaaactgccaacccagataataaggagaggaaaaaatcagatgctcagggagcagaagtcaacaggaggccacaatggaacagagatgaagaaagtactggaagaagggagttaactggttcctgcgtaaaaaataagcagaaaagttcttaacacttaacatagttctacacacacagtcatgctctttctcagcaaggaactaagcagaggaaaaaactcacaagacaaaaaaaaacatccaggtagctctataagtaacgaaaggggataagaaacagtttatacaacctagcctgcgtaaacaggcactgtagggaatagagacatggtgtcaccaggagggtgatggagatggcggctcaccctggaatcccactcattgagtgtcttgatgttgatgaaggacacttccccgttggctccagtcatgacgccatcgtgctcacaacggacaataaggtcaatatcatctccaagcttccacctgcggtaactgcagcaaaaaagaaactcatgtggtcactggggattctatagagtggggcccgtgctccagtctggccacaatacccaccagagaggtgacctaccggtacgcaacagaggcgatttcattcttatccatgtcgtcctccacaaacgggtttgggttggggaagttgtatctttccttcccctgcaaaaacaaaggtgtcacaagacagagctaactttgttgacaaggccaaggccaatcagtcagacccagcacctctgcttagttgcagccctggccaggttcctggggcccttgatggggctctgagctcgctgcctgttttgtgcctacttgacccctcccaactgttagcacctgatgaattagaacaatgacttagtaaccatgctcatctctacttcatttttttgccatggcatatattcaccatttgatgtaaatcaatttattatttattgttcactgtgtttcctcctccactatcattaaattctgtaagggcaggaactttgttcaaagtcagagagcctaacatccaagcccaggcatgtaactcccctgctaaaggtggggactgcgtctgacctgctcagtcccacaaccaagagcctagcacaaagcagatgctccacaaacagcagctgattaaataagaatgaatcaatgcccagagactcgtttcctcaccattctcaagcactgctgggagaaattgtggttgatgtaggttgcctccatggccaggttgcggggtgaattgaaggaattaccttcatcttgagggggctcattggcagtctcactcactgtcaggaggtctgcaaaagcgtggcatggtcactcaccatgcaacaaagagtcactgacaatgtgcgcagcgctgtggggagatgtggagaggcaaacaacacaagtccttccttcaaagaactgccctctcctaaagtgggtctccctggtgtggaacacataagcgggggagtggggcagctgctccaggataactcaagatactgtccaacattcaattcaatcacacagtaacgaagctgtcccttttcagtcgttttggattcctcaagagaatgattttgcaagctttttaataaagacctcaggcttcaggctcagaatataaacacttttttttttgagatggagtcttgctctgtcacccaggttggagtgcagtggtgtgtccacggctcactgcaacctctgcctcctgggttcaagcgattctcctgcctcagcctcctaagtagctgggattacatgtgtccaccaccacacctggctaatttttgtatttttagtagagactgggtttcaccatgttggccaggcttggtctcgatctcctgatgtcaagtgattctccgcctcggcctcccaaagtggcaggattacaggttgtgagccaccgtgtccagcctgttttgttaatttttgagtgacatggttttcctttatggtgtataaatacatatatgtatggtataaaaaatatatatgtatatacagtaagcaaacactgaacaaggtatgcaagatggcaaaagtcgaaaaaggggtatttaaatgaataacatttgggccaggtgtgttggctcacacctctaatcgcagcactttgggaggccaaggctgatggatcacttgaggccaggagttcgagaccagcctcgccaacatggtgaaaccgtctctactaaaaatatagaaagtagccaggcgtaatggcacatgcctgtaatcccagctattcgggaggctgaggcagaagaatcacttgaatgtgggaggcagacgctgcagtgagccaagactgcgccactgcactccagcctgggtgacagagtgagactctctgtctcaattaaaaaaaaaaaaaaacaacaaaaaagcaacatttggaagcttgctattagggtgctgtgaggactccaaaagctgaggcctcaagcaggtactgcagtgacagtctcttctcctaacctctaaagagtgtgggagattcagacactgctgctgtcaattcccttgggaagacagaccactttctatccattctctagtaccagagacttgttctgtaccaacaaaaatactcaatgcctttgagttgctccccaggcacgcttcttaccaaagtcagagttgtctctcttgtcaaagaagagtttggacccaactctctggacgacaatatcccaggaatacactgagcgggtacagctcatcagcgtggccaggatggcatcagtggcaaacacattcccctgagtttttgccagctgcaaagaggatcaaagagagaagatggaaagacactcccaggtctcactgcccactcacatggatgggaaagaactcctttgctgaccacataaatccttaataaggaggccccacctcattgaccaaaaacactgcagccagtgagccagcaagtttcgggtggcagtggcactgcagcaccctaagcacctgctagattccagccaagtgcttcagatgctttcacctttgccccagtggtagtgctatgtacatctaccccttgttgcagatgagagaactaaggctccagagactaagccaggaagcgcggcagaactgggcttcaagtccagctgtgcttaacatccacatttccggtctacctggcaaagtgcttttacctataatacatacgttattcccatgtcttctgttctttctgcagcttcagctgtagaagccgacagcattcctaacaagggggagaggggcagaaggaggcgcacaccttgcggatgacagggtcgtctgtggtggtgacagtgtggaagatgcgcttgatgctccgcagtggcttctcactcctcgtggtgatgcggtcaaaggctttgtcgtagtattctagggccccacaacactcactgtgggaagagcaggcaaagacatgcaaagtaagagagataacccccagttttttcttttaagccatacatccagaagtcttatccaaaagtctaaaagaggtggaaagcaatctctggccagagcaggagagacgaatcctcagtgcttgctcagttcctgtccacttaacacctggcatagaacacagcaagcacaactcatctagcccaacgcccccattttaaaggtagggtgaccgaggctaagacaggagatgactagttatagaagcacctgggtaggctgacttctcgtctggtgctctggtttcccactacctaaattccacctacttgtcctttgaggtaagaagctatttgaaatgtcaggagaagcaaagattcctcctgaagaattgctgtgtttcttttcctgacaagagttttataacttaatcttattgctcttttgctcaggatgccaggaaacagaaatatacagtttaataatcagcaaattccattctgctttctctttctgccaaaagagttgtataactcatttcttctttcctcaggataccaggaagttaaaaagaagtttgcagtcagtgaacttctgcttttccccttggtcttgatttttttttttttgagatggagtttcgctcttgttgcccaggctggagtgcaatggcaagatctcagctcactgcaacctccacctccagggtttaagtgattctcgtgcctcagcctcctgagtagctgggattacaggtgtgtgccaccacacccggctaagtttttgtatttttagtagagactgggtttcaccatgttggccaggctggtcttgaactcctgacctcaggtgacccactgcacctggccggtcttgatttttttcaaatacctctgttaaccttatgaaatgtgttttgagtaagtggcttcaaagcctttttggaaatactagggcttaagaaaatacccatcaccagctggtccacacacataagagcagtgtagaaagtagtaaaagatgctgcttacatgtcctgtggctctgatacttccaagtagcgcatcttcatcaactgaggaaaatccatttcctctttcacttcccaatcactacgaacttcaactgaagagtctcggggtttctgcagttgaaaaccattagaggaaaaaaaagttatagtccatacaaaacataaataaaagacaggctaaaaatatgaagagctggcctggtgcagtggctcatgcctgtagtcccagcactttgggaagctggggcaggatgattgcttgagcccaggagtttgaggctgcagtgagctatgattgcactactgcactccagcctgagtgacacgagatcctgtctcaaacaacaaccacataaaacggaggggctcagtggccctttgggaggccaaggcgggcagatcacctgaggtcaggagttcgagaccagcctgtccaacatggtgaaaccccatctctactaaaaatacaaaaattagccaggcatggtgatgcatgcctgtaatcccagctactcgggaggctgaggcaggagaacagcttgaatctgggaggcggaggttgcagtgagctgagatagcaccactgcactccagcctgggtgacagagcaagactgcgtctcaataaaagagagaaaagaaaaagagcttttattcaataaatggagtgctgactgttttataagacagaatccctgactcccaggaatttatggtgtggaagaggaccaaagggatcaaaagttcaaaagcaaatggggttccactcccaggtaatgatgtcacctgatgaacatgtagaaggtcctttatatttctctcgggttattaactattcttgatacagcatcatatccaacaaaatgtagcttcacttttgcttacatgtgttctgttctcagaatgcccacacaagcacacgcaggtgaacgttcacagcagcatcaataatagtcaaaaagtgaaaaacaactcaaatgttcatcagcatgtgaatggctcaaaacaacatgatgtataattcaaaggactcttatttggcaataaacaagaaaagaagctcatctgggctgggtgtggtgcctcacgcctgtaatcccagcactttgggaggctgaggtgggtggatcatctgaggtcaggagtttgaaaccagccgggccaacatggtaaaaccctgtctctacaaaacatatgaaaaaaaaaaaaaaaaagccagacatgttggcacgtgcctgtaatcctagctacctgggaggctgaggtgtgagaatcactttaacccgggaggcggaggttgcagtgagccaagatcgcgccactggcactgcagcttgggtgacagagtgagattccatcttaaaaaaacaaaaaacaaaaaccaaaaaaaccaacaacagatgaagcacagctgaacttgaacaacatgggtttgaagtacatgggtctacttaatatgcagattttcttcaaacaaacatggattgaaaatacaagccaggcgcagtggctcatggctgtaaccccagcactttgggaggctgaggtgggtggactgcttgagctcaggagtttgagaccagcctggggaacatggcagaaccccctatctacagaaaatacaaaaattagccaggcgtggtggtgcatgcctatagtctcagctactcagaaggctgaggtaggaggatcacttgaacccagcaggcagaggttgcagttggctaagattcatgccactgcactccagcctgggtgacagagcaagactctgtctcaaaaaagaaaagaaaaagaaaacagtattcttgggatgcaaaccccgagtatatggagggccgacttttcatatatgtggctaccacaggccgaatgtgggacttgagaatgtgtagactttcatatactgaaggaaaactgtaccgacacatgctaccacatggatgactcttgaaaacacgctaaataaaagctgccagttactaaagaccacatattgtatgattccatttatgtaaaatgtctagaacaaaaaatcccgagacagaaaacagattcatagctgcctactgctgggctactgggggtgctggtgtttgggtgtgcctcctggaattcatttggcaatctggttgctactgcggcagtgtcgggaggtagggcctttaagagattaggtcgttaaaaggaataaatgcctcatgcccttctctcaggaatgggctaactacccaaagtttagcccttttctctgttgcaccctgctcccgcttctgctttttctgccatgctatcaagcagcatgaggccctcaccagatgtggctcctgatctgggacttcccagtccccagaaccatgagctaaagaaaccgctttataacttacccactctcaggtattctgttctagcaacggaaaacagatcaagacagggtgactgctaaagggtaagggattcttttgagggtgatgaaaatggtctgaaattgaccagttacagaactcttcaaatatattaaaaaccactaaattgtacggtatgtgaagtatatctcatctaagctattaataaagacaaccaaataaacagaaccaaattccaaggcagaattctggtataaatacattacctgtgatttctgatcccatttctgcctaaccccaaattgtttctggaactttttctgcagtcgaatgcgttctctggaaagacagacatatgatctcagtgcagacctttaaaccagtggcttcttcaaaaggcacacgctgccattctcttcagctaaaccttaccatcaccactaactcctttaaactacgaaaaatgggcttagagaaaggaagagacccagacggtgcatactggaggtgttagaaaaggtacactgcctccaaatactgaccagatgattttacttcatctatagtgactgttcactgatagttccaatctggggtgtagtggccgctggaccacacaacaccaggaggctcaaaggaccagcatacagggggcttcctagagttgacccacagcagaactgagcccaggtaagctccagagcctcttcttgcctgcctgtgtttccctttagtgcgcatgaccagcacaaggagttagtttcctgcccatgctatctgccatgaaccagcctgagaacgacaagctaaaagggggcttaactggttgtagaaagtattttccttttttgcagtggtggggaatacaaccatcctcctgctttggtcctgtggtttccaaatacggccagtctgggaagggtgtcttgttccagcaggatgaaaatctcacctctctttctgtttggcactcttaggcaggatctgcaggttgaactgcaacatgttccgacgatctttgtctctgcggaggttcctctgggcatcagcaagaaacatccatgttaaaatcttggagatttggctcacaataggcagaacaagtgggaggtctttggagtaaatttaggatgccaaatcccaagtttcacatcttactctgtgctttcactctacggcatcaacagcttgggggtgttagggggtaagtgcttggactttgcttagacctatactcccatgatatatttttcattgaagtatgtttactgggtctcattagattttctgagtttgcctctttaaataataataggcaatctgactggaccatctacttaataaagtctgcacacagcaattaagtgtggtaacaggcacaggtgcaccttcttatccagcacaaatgtttttagcatacaagtctgatgtcctagctactggcaaacagaaatataaactatttaaatgcatccctgatcctagtgcaagttcaccttggtaccacttgttatggaacggtgacccgagattcacgaaaagacctataatatgcttccctctctcattaggagtcacaaggtagcattttttagcaggtgatggccaacagtaacagccccaagatggtgtggttgctggctcttggcctacctgggcaaatctcattcgattccgctggtaggccgtcttctgtgtgcgcgctgtatccaccagctggaagctactttcatcctcctcatggaaataagcatattgacttccaccaccaaactgagaggagtacttatctggaggcaaaggtgatggcatgtagtaactgcacccacagactttaccagatatgcaccagtctaaagccttgctatttcaagtgtggtcttgagacctgtagcattggctgaaagcttgttagacacacagactcacagtcccaccccatacccactgaatcagaaccagcattttaacaagatccccggatgattcatatgcacattcaattttgaacaactctggcctaaagaactttctaagccaagaatctgaaggactcaaactaacccatttcactctctgcgttattgtgtgagaatctgaggtatttattgctaaccaccatctccattatcaggggcccatggcaggtatgtctaatagatcacgatatactttcttgccaatctcagcctcagctatcctaacttagttctccaggcagccacctccaactatctgaagtggcagagagaaaaagcctttttatggtaccaggatcttaaaaccaggggttttacttttttttttttttttttttttggagacaggatctggctctgtcaccaggctggagtacaatagcatgatctctgctcactgcaacctctaacttctgggttcaagtgattgtcctgcctcagccacccgagtagctgggattacaggtgcacgccaccacgcccagctaatgttttcaacaggtttttaaaagggcccaaaaccccattttaataggctagacctctttaatgaatggtctaagttttgagggctatttccaaaaatgtggttattgttaaagcccagaatacatccctaaaagttatgaattattgttggcagtttcttcccattctaaaaagctttcagaagaaggtcattagaataaagaacaactttcccaaggccctgattggggcattcagttgcagaaacacttacttgtgtacctcttatcttggtatgtggctcctgtccagtctgcaacctacgaagaacaagaaaagacagagaatgcacaggtcaaccaggcaagtttctgcagaaccagaaatccctgagcgcgagaggacagcgtggaagagtctcagaatttgttcacaacacctctgtaagtgcccagctcttctatgactacacccagagataacctttctcagctggcatccctataagaaattcaggagttaagattttgagacaataaaatctaaacagggactcgagagtagcagccacagctgcaaagattcagactcctgctgacaggcatgtacctttcctagccgatctcctttgctgaacggctggtagggcatatcccgaaactgctcgggaaccgcacagggaccccagcctgaggggttgtcctggatcacgggtgtcatgaactttgccatcttccaaaatctgaaaaatataaatcatgtgagtagcggcatgaacgaaggcctcagagtacaaaacaccctccatatgaagtaagcaaagacataaatgatagaactcaaaaagcaacacgcaaaatggaaccctcaactgttgagcgactactactgtttttgttaattatactgtgaatatgtacttaaaactgagaagaatgcaaacaaaactgatttttcatatttcattaattccacgacactctctttttactgtaacatctttaaaatgaggctgcaccttgtgtttgacagggtgttgtattgattggtagtttttctttttctgtgttacataagtgtttaaaaaaatttaatggtgtcagatttgataaaatgtcctaatgttttttcaaatatagtaaccttgttttggttctgagatataccttcaccaattcatacaaactcaacttccctaagacttagtagtcttttctttctttcttttttttttttgagacagagtctcactttgtcacccatgctggggtgcagtggcgtgcaacttccgccttccgagttcaagcgattctcctgcctcagcctcctgagtagctgggattacaggcaagcgccgcctggctattttctgtgtttttagtggagacagggtttcaccatgttgtccaggctagtcttgaactcctgacctcaaatgatcctcccgcctcgacctcccaaagtgctgggattacaggcgtgagccaccacgtccagccaccttagtcttttccatctgcaaaataaacaagatccttgttctaagcactttgtataatgccacacaagtattcagacttgcaaaagtgcatttatgtatatagagtgctgagaaaaaaagatctttaagtatatcctgaaattcaattttcctttctcattgtttcaattttctgccatcaacgcaaatcctgtgtgcagtgcaagcggacataaagccaggcagaagaactgccagagggccaaggaggtccccacagacctcaggcccaaagttgccatgttaaatgttcatgaatactgccaggcactgttcttactgtttaccactcattcattcatacagtcctgccaacaatcctgtgaggtaggagccaatgttatccgcactctccagataagaaaaccaaagcacagagaaatgaagaaattgcccaaagttgaaatgctagtggatgaaaaacgtgaaccaaagcagtctgaccccagagtctgcactctgcataatgctatagccctcttgggaattaaaaaaccggcgctgtatagcagatggctgcccgacacttctataaaaaaacctatgcatttatcttccgttgtaaccttctgaaaatgcttagaaggcgagttcctagaggaaaattcactacacaagtatttcttggaggccgggcgcggtggctcacgcctgtaatcccagcactttgagaggccgaggtgggcggatcacgaggtcagcagttcgagaccagcctggtcaacatggtgaaacccagtctctactaaaaatacaaaaattagctgggcgtggtggcgggcacctgtaataccagctactcaggaggcggaggttgcagtgagccaagatcctgccattacactccagcctgggcaacagagcaagactccgtctcaaaaaaacaaaaatcaaatgtttcttggaggctggagagcaatcaaaagaacaggtatgctgaacttagtaaactctcctcaaagccccatgctggggagattgaggcttccttcagagatgacatttgggtgacagcaacacaggatgaacctagaagtttcatctttctaatagaaactataggaagaggacagaagaaaaagggtggtggtctcagaacaatttgtattaaataaatattgctgagctcctacgtgttaggccctataccagataatttaacaccattgaccacccccccacccctactttagaggcaaaaatttgaagctcagcctactcaagcagctgacctcatcatttcaaaacagatttgatttccagggttgcctgctgtcagtccagccttctttccattatattacagctgggcagcagcccgcaaagatcaggggtttgagaccgtacatcataataccaagacaacgagtctcaaaacacactttaaaaaatcgggttctgtcagaagctcaagaagggaagaggcccgaggctcgacctgcatcacctccctggaaagccagggatgagataccctggctttaataaatgtttttttttttaagagcagagcggaaccaggaggagaaactgagccgctcagcaaaaacgaagtaacagctgtactagtcacaggggcaggatagggaggttccaagagggcactcagaaggggctctgtggttggcaggccactacagatcataagccgtccatcgctgaacagggggtggggtagatttaagatcagagatcaaatctacttctctatcctagcctccagtttcacaaaaaaggaaagataacctatgcactgtgaattcctaagaacaggggccaaacaccgctcagcctggtacccctaagacctcactcaaaaagtcagggagttttcggccacttcagaaagactttgttgttacccctccgtcttaacccaggtgagttaagtgacaatcaaattcacccagctcatgggcactgagcagggccgagggccaaggacctcacccacaaggtcgtgtcccgcgttcagtagcgtgcgggacgcggggcccccgaaagtggattcctgccccgcccagcggagggacggcaacagcaggaagggactaagagaggtctcttccgggaggccccccgaaggctggacctagtccgaaccggctccggagggccgcaggaacctatgaaacacgccgctcacctgcaatggcctcggccggccgggatggcaacagatggtgcgtgccggggaccgcgttagcagcagcactcttgagaaaccaggaaaagaggaaacatgcgcgcgcagcgggcgccgccgtaaacacgaccggcgctgtcgtaaactgctctcccgcttcctctgggttgggcggaagaactcacgagccgtaaagcgaaggtccacccggaaatccgttactgcgtttcgccaggcgtcctcattagcctccgaggcgccgagacgcgagaggtgtgattggcactacgtcaggcggtatccggggacgcccaaagagggcgttcatcactgaaacttggcggccgcgcaatcgaagctcgaggcggggagcgactggcgcccttctgtgtcccacaatgcttcgcggcgcgcctcagcccccatgtatcccaccgtcacccgcgactccccgcctgttctacctgcctgcttaatgtgaaactcagcgcaggggaggtccgtcggtgtcttaggcggtccttattgttactcctccgcctttatagttgtggaaactgaggctcagaagtgccaagtgacctgcctagatcagactgttagtttagggttctaaccgccagagttcaaaccatacttccgcagttctcaaacttaattgtaggacagggatttctggaacagtgtttttatttatttttatttattttttgagacagggtttcgctctgtcgcccaggctgaaatgtagtggcaggatcacggcttattgcaccctcgacttctcaggtacaagcgatcctcccagttcagcctcccgagtcgttggtgtacacaggcacgcacaaccacgcctgcctaatttttgtatttttggtagagatggggttttgctatgttgctcaggctggtctcaaactcctgagctcaacagtccacccactggggctagggttacaggcatgagtcaccgtacccggccagctaatgatttttaaaaattttgtagagacagcgtctcactatgttgcccgggctggtctttaactcctggtctaaagtggtcctctcgcctcagcgtgcggagcagctgaggctacaggtgcatgccaccatgcctggctaatttttttttttagacggagtcttgctctgtcttccaggctggagtggagtgcagtggcgctatctcagttcactgcaacctccgcatcccaggttcaggtgattctcctgcttcagtctcccgagtagctgggattgcaggcgtgtaccaacatgcccggctaattttccttttagtagagacggggtttcaccttgctgaccaggctggtctcgaactcctgacctcaggtgatctacccacctcggcctcccaaagtgctaggattacaggcgtgagccactgcgtccggctgcctggctaattaaaaaaaaaaaaaaaaacttctgtggagacgaagtctcatcatgttgccaaggctagtctcaaactcctgggctcaagcagtcctcctgtctcggtctcccaaagtgctgggattacgggcgtgagccaccacacctgaccaggatagtatttttaaaaattcagattctgggtctcattttgatagattatacggatatgtttatgctggagcccaagagctccgcattagctgtgattctgaagtgacgactcaggaactgctttactacagtagataacagtgctgtcctctcagcaactcccaggctatggagttcctcctggtgtctttctttcggaattttaaaacaatgaaagataatctgagggcatgactttattcaaacctcagatcctttctacctgacataggtttccttagccgcctagtatgtctcctttattagaaaatatacctgaagtctaggctctgccacattcttttttttttcttttcttttctttttttttttttgagacggagtgtcgctctgttgccaggcgggagtgcagtggcgcgatctcagctcactgcaacgtccacctcctgggttcaagtgattctcctgtctcagcctcctgagtagctgggaatacaggcatgcgccaccatgcccagctaatttttatatttttagtagagacagggtttcaccatgttggctgggatggtctcaatcccttgaccttgtgatccccccgcctcggcctcccaaagtgttgggattacaggcataagccactgtgcccagccagctctgccacttgatagctatgtgtggccttcacattccttgccttgtttccttatttgtaaattgaagatgataattagagggcgctgtgggggtgaaaataaatgtgtgtgaaaggacttagtaattccacttatcatttgggtgaacttggacaggttattcaacctctttttttttttttttttttttttgagacagagtctcgctctgttgcccaggctggagtgcagtggcgagatctcggctcgctgcaacctctgcctcccaggttcaagcaattatctgccccagcctcccgagtagctgggattacaggtgcccaccaccatatccggctaattttttgtactgttagtagagacggggtttcaccatgttggtcaggctggtctcgaactcctgaccttgtgatccacccgcctcagcctctcaaagtgctgggattacaggcgtgagccaccgcacctggcctattcaacctctctaaacctgcttattcatctgaaaaatgagaatgctaatagcagcacctatttccataagctctctcccaactgctcattttttttttttcctaatttttgttaatggtgtctggtgaattgtgcccagtggaaagccttgtagtcatcactggtagttcgtttttccttccctcccacatttagttcttcactatgttctctttattctacttgcacaatgcatcttgaatgctatcactttttttttttttttttttttgagacagagtcttgccctgtcacccaggctggtgtgcagtggcgcaatctcagctcactgcaacctccgcctcccgggttcaagcaattctcctgcctcagcctcccaagtagctgggattacaggcgtgtgccaccacgcctgcctaattttttgtatctttagtagagatggggtttctccatgttggtcaggctggtctcgaactcttgaccttgtgatccacccgcctcggcctctcaaagtgctgggattacaggcgtgagccactgtgcccagccgaatgctatcactttttatccccatttcacatcacgcttggatacactcttgctgctctagggtttcttctctatatggtggtcaaaggaatctgtccacaaccttctactagcttcccattatatgcttagagggaaatatgaatatctttttgtggcctgtgtggtcactgtctacctttgttatttttaaaatatttacttctttgagacagggtcttgctctgttgtccaggctggagtgcagtggtgtgatcatggctcactgcagtcttgaccttttgggctcaagcaatcctcccacctcagcctccgagtaggtgggactagaggctcatgctgccactcctggctaatttttaattttttgtagaaatggggtctcactatgttgccccggctggtctggaactcctgggcttaagccatcctccagccttggcctcccaatatgctgggattacaggtgtaagccacctcacctggccactggtctacctctagccaccatattcttcttgtgccttaaatacactgaacttctttctttctttttcttttttttttttttgaaacggagtctagctctgttgtccagcctggagtgcagtggtgtgatcttggctcactgcaacctctgcctctggggttcaagtgattctcctgcctcagcctcccaagtagctggaactacaggtgtgtgcctccacaccaggctagtttttgtatttttagtagagacggggattcatcatgttggccaggctggtctcaaactcctgacctccagtgatccatccaccttggcctcccaaagtgctgggattacaggcgtgagccactgtgcccagcccaccagccttctttccatctcagcagggcctctggacttgacgttctttctgcatggcacactcttcccccaggtttcctggtagttgaattggtctcatcatctatgcctctgctcgagagttaactccttatgcaggtcttttctgaccatcatttctaaaacaggtgattgtattagtccattttcatgctgctgataaagacatactggagactgggaaatttacagaagaaagaggtttaatggacttacagttccacatggctggggaggcctcacaatcatggcagaaggcaaggaggagcaagtcacattttacatggatggtagcaggcaaagagagagcgcttgtgtaggggaactcccccttttaaaatcgtcagatcttgtgagacttattcactatcatgagaacagcatggaaaagacctgcccccatgattcgattacctccccctgggtccctctcacagcacatgggaattcaagatgagattttggtgaggacacagccaaagcgtatcactggcatagagtaggtgcttaagtaggtactcattgactgagttaatgaaaaaaagaatctggccagtggtggtgtctcatgcctgtaatcccagcactttgagaggccaaggcgggcagatcacctgaggtcaggagtttgagaccagcctggccaaaatggtgaaatcctctactaaaaaaacaaaaattagccaggtgtggtggaaggcaccctgtgatcccagctacctgggaggcggaggttgcagtgagctgagatagcaccactggactccagcctgggctgcaagagcgaaactccatctcaaaaaaaaaaaaaaaaaagaaagaatcaaaattggaggaccaggtgtggtgtctcatgcctgtagtcccagcactttgggaggccgaggcaggtggatcacctgaggtcgggagtttgagatcagcctggccaacatggtggaacctcatctctactaaaaatacagaaattagccaggcgtggtggtgggtgcctgtaatcccagctactggggaggctgaggcaggagaattgcttgaatctcgtaagtggaggttgcagtgagccaagatcacaccactgcactccagcctgggtgacagagtgagagtctgtctaaaaaaaaaaaaaaaaaaattggtatgagattaactggcattaatgaggaccactcctcggcagcagacctgttgtatttatgatcaataatgtgagattcttgctttcaaagggcttccattccaaccaaaggaatgatgacagaaatgtttttttttcttttttaaaattttttaattttaattatatatttcattttactcaatatatccaaaatattatcaccatacgatataaaagccttattaatgggaatgttttacattcttttttgtgctaagttaccaaaatctggtatatatttcacatgcatggcataactcaatttgcactagctatatttcaaatgttcaaaagccacatgtagctaatgactattatattggacagatctaaatatagagttttcctgaaacttaaagacgtttcatgagactagcacttagtaagtgtggacaagagaggaatgagatgaagctggagtgggacaggcagtgatagatcacacagggcctggtaggcttgggaaggagtttggattttatactaatggcattaggtcacctcctacaagaagtctttcctaatgtcccaaaaagagttaaccactccatctcttgtgccaccatggcttttgatgaaaaacccaatatggcaccccggattctttattatatcttttagtatatacatggctgatttctcctcaagggcagtgaatgtgtctttattcatctctttattcccaaggcctggcacacctcttagcatataataggtactatatatttattggaagagtgaatgagtgggggtgcgagaatggattccttcagatctattttccagctcattaattctccctctagctatgtctcatctgctatttaacacatcccttgagttttcattttaacaactatgttttcatttctaaaatatctgtatgggttctttttcaaattagcctggtcaatttagagtttcttctacttatctcgttttgtgattctacatttcatatctttaaatatttcatagttattttatattccataccgaatagttccaatgtatcaagtgccttgggatctaaatctgctggtgattgattttcctgactctcactcatggtggcttattttcttctgtatctgattttcttcagttgtgagttcacatttgttcgatcttaacctgtcctgctttagcagtggttttcaaagtgtggttcctggacgagcacaataaacagcacctgggaattttttagaaatgcaagttctagggctgggcacggtggcacatgcctgtaatcccagcactttgggaggctgaggtgggtggatcatgaggtcaggagttcgagaccagccggaccaacatagtgaaaccccatctctactaaaaacacaaaaattagccaggcgtagtggcatgtgcctgtaatcccagctactcgagaggctgaggcaggagaatcacttgaacccggaaggtcgcggtgagcagagatcgctctactgcactccagcctgggcgacacagcgagactccgtctcaaaaaaaaaaaaaaaaaaatgcaagttctagagcccccatcccagacttgctaaatgagaaatgctgaaagtgaggcccagtaacctgtatttgacaagccctatagaaggttctgacacacactggcgtatgaaaaccactgcttgcaagataatttggtttacctctttaggaagccaaggagtgctaccgaccagcagccactttagtttttatttttaattttttagttttttattgactatgccttataaaaggaccagcagccactttaactttttggggctgggcttaaactagagttgcaggctcagctttactatgctgctgctggcctaaggctgtttactgcctgtagtgctggtatcatttgcagtcagggcaatcttacctttagcgctgtgttcttctccactgctttcccctcctgttccacctcaatataattttgtgggaggaggaggggagggttgaaggaactgtcttcaaagatttctgtaatttacagtgaacccaaaaattacattaaaagtctgtattatccaggatcgagctgttttaccatgggaaagcccatcagagtacccaaccctccatatggccagaaagaacaactctgtctgaatacacgagtttcaggggctgcttgtgccttcactcattagggttaaaacatggtcttaaagctgaaggccgcctctgacctgacagctccaagtcctgcggactcctgcgcccagtaatcacctccatggcgaagcactgttcctgctcccgcaggcggctataggtccacagcaggctctgaaagtgctcccacagctggacacgctgccccaggtctgggggccgcagcctgagggcagagccagagagggcgggagagaccacgagaaagctggtctctcccacacccaacaaaaggaccagagtcccagctcagtgttagagccaggtgagcccatgtgacctgcccacacagctgggaaagcgggtcgggtttctggcccagctctagctgtggagtggggtgggataggcacggagccagaaggcaggcagctgagcaaatcacctcactcttcaatctctgtcacacaaacacatgtcatataaacccagctagagagagccagggtggtgcttaagcttctcacacagaggccactgaacacagaaaggtctggtctatcatcagggccctacacagggttgcagccatctcggatgctggcaaggtctgcactggccaatgtggttcatgtaacaggcatctaccacctgcagcatttgccactgaaaccatgacctatctgggctaaaatggctcatgaaacaatgtttgtgcatttgagaaatgcctcgagcatgtacagcttccgctgcaggtccccctcgctcttggtgtggtcgccattgatggcaatgaacaggcattctccaaacaggtgaaggacatacagggagttgctgttttccatggagaagcaggtgtaggtgtccgagagcttctccagcatcgtcatggaggagatgatgaccggggctaggagggggctgagctggtcctgtagggcagggagctcttcttcctcattctctgactgcccgaacttcagctggagactctcttcaaactcctcatccgtccagtagaagagggcctctgtgccctcaatggccaccaagatgcacttcatcttggtaaggagcacagtggagcgtccagacagccagaggttcagaaagggctgcagcagacagactctgtgactgcctcatcggagagcagcacaacatccctggtcctgcaaatgcggatcgcggcgtgcacagcaccccgcctgcgggacagaaatgttttctgaactgaaaaagggggactacaggtgcctgccaggccctccatatacatacatccccctatgtctgtgtctagaagtgagatacaccgttatttctgttttctgattggcctttttagttttttgagacagagtctccctctcttacccaggctggagtgcagtggctcgatcttggctcactgcaacctctgcctccggggttcaggcaattctcctgcctcaggctccggagtagctggaattacaggcctgcaccaccacgcctggctaatttttgtatttttggtagagacggggtttggccatgttggctaggctgttctcgaactcctaaactcatgttatccaccccccctcggcctcccaaagtgctgggattacaggtgtgagccaccgcaactggcccattggcctttcttgttgtactgttctgtcccttccaggtaagacaggtacattttctagtagtaagctcctgtgtcttaaaaaagaaaataacattcattgagtgcttactttatgccaggcactgtgctatgggctttatataaataatttcctctctgaaaaaaacaaagacaacaaaaaaaattacttctttgattcttttctaaaagttccttgaaattgccatggaccctcccattcgtgcaggtggggagaaagaagctcagagtcgttgagtacttggcccagtgagtaaatggtggagccaggatttgtgaacagttttgtggactcagaagcttccatcccttacaggggtggtgaagaaggcctttccgagaggcccgagaggccccaaggcagaaccatccagccaagcccaccccaaattcctgtcccacagaaaccaagagagataataaaaagacggttgcagggttgtctcgcccctcctctgtctcttgcctgctctctctaaggaattcagagccttcccatcttgaataccagcggcagctccagaatttccccgtgggacaggcttactgagagccgtcttgtgaagggggtagccctggacttgcctgggagctgtgtctgtgtagcaggtactctgctttcaggaggatgcaggttttgttgggggagagtgttccagggactgtgaggggactgagcctgctcctgaagccatctcctttttatttaattttatttttttgagacagagtctcgctgtgttgcctaggctggagtgcagtggcaagatcttggctcactgcaacctccatctcccggttcaaatgattctcctgcctcagcctcccgagtagctgggattacaggtgcccgccaccatgcctggcaaattgttgtatttttagtagagatgaggtttcaccatgttggtcaggctggtcttgaactcctgacctcaggtgatccacctgacttggccttcgaaagtgctgggattacaggcatgagccactgcgcccgaagccatctcttggtaaaatactgctgagcattcagacagaacagaattaggagaaagagaaggaaccagcattgatttcttcaacacactgtgctaggtacctcaggcatttcgattattctaggctgtgagtgaagagttgttgccagaatctaaagtgtgttctgagaacttggccaaatgtagggtgaccatatgacttaccattcaaatttgggacactttgggggtgacgaagggattactatcaataattatgccctgggattgtctcacttaaactgggaggtatggtcaccctaggcagaagggaagtaaaatggtcctctgttactgattatctgttgctgtgtaaccaatcacaccaaaatttagtggtttaaaacaacaacagtctttttattatatctcttagtttctgtgggtcaggaattgggagagggcttggctgggtggttctgacctggggtctctcatgcattatagtttggtgtgggtggagcttctgtttttctctctctccatttagcctcagggtcattctgtagtgagtccatgtggggagttcagagcaagtattctggcgaacaagctggaagccatgctgccttctgtgatctagcctccgaagttatacagcatctctcccatccccgtaacttgttggttccaagtgagtcacaagcctgcctagagtcaagggcgagggaggacagagactgaatttcttgctgggtaaggcacaaagttatggaacaagtatgtggagtgggaggtattgtcgtggccatcttaggggtatgaactctgccatggatgcagactggccttttctaagagtcatcagtttggttatctgcaaacatgactgaagagtgtggggtacatcaatgccaggcaaagtttctgaaggagtctggctcagagggggaggcctggaatacgatcctagtttaccaaggggaacctggtcagttaccttgcaactttggagaaagagtgaatggaagtgtccctcagtaggggacatttaggaaggggatggtcacagagccagggctggcattgtccagggcacaggttcttggttgcgctggctcaagcatcatccccattccccgggtaagactgtcctcccaaaacagaggtggcttcaagctgctctgtgataaacacttttttttttttttttttttgagatggagtctggctgtgtcacccaggctggagtgcagtggtgcaatcttggctcactgcaacctctgcctcccaggttcaagtgattcttatgcctcagcctccctagtagctgggattacaggtgcctgccaccatgcctggctaatttttgtatttttagtagagatggggtttcaccacgttggtcaggctggtctcgaattcctgacctcatgatccgcccgcctcggcctcccaaagtgctgggattacaggcgtgagccaccgtgcctggccgataaatgcttcttaatgctgttgtttattctgactccctgccaccaagcagtgctgtgacaccgtggatcctcatggaacttgtgctgtagggaagcacgtgctggttaggctgatggaagtgctccattctgctggtggggtatttactgtgctctccaataataaatggatcttctgctatgcgtcagccttgtaagtttggtcaaagggagtctgccaccgccttgtgtgcagaaagatcccggatatcctgtggtggattcacctcattgggaccggtcagtgtggccaacctctcttccagagtggcaacttgcgtttccttgcttatcttttaagaagcaccataggaatcatcaccccattttatagacgagaacactgaggctcagagaggaggaatgtcttgccccaggtgagccagctggtcagggtgcatttggaatggaaacccaggtgtggctgaaaccaaagctggcactctccatgcacaattccaaaacccacaaagctctgaaaatctaaagctttttcatgagattggggcaagcatttgatggcaaacctgatatgaattggatgtgaggttatttatagtctttattttgtcccacttagcgtgaatatttatacattttgctgcagaaaaattaaagggtttatggaatattgctccagagctcactggcatgtcacctgatatgcggtagatccactcgaaaacctttcaggaatccaaagaattccaagttataaagcacattgaggccggatgtggtggcttcagacctgtaatcccagcactttgggagcccaaggcgggcagctcaccagaagtcagtagtttgagaccagcctgggtgaaacctcatctctactaaaatacaaaaattagccaggcgtggtggtgggtccctgtaatcccagctactgggggaggctgaggcatgagaatcgcttgaacccaggaggtggaggttacagtgagccaaaatcgggccactgcactccagcctggccgacagagtgaaactgtgtctcaaaataaataaaatataaaataaaatacataaattgataaagcacattgagccgcgaggatttcagataagaaattgtggagctgtgctacctgtaccaaacttttctgtctcggttaggcagagatcactacccccattctgcagatgaggaagactgagggcaaggaacatggtgtcccaggtaggacggcagccattttatcatcctgttggaggctgtgccagcaggaaaggaagctttggagccaccagcccaccccagcctcccaagaaccttgttgtctcagcaaaatttcagaactagaaaacctggaaagattaaagccccaaagaatgccacaagtcccccaggaagaaagggaggctttgctgtgcgttccagtggtcgacattctaaatcattttttatttcagctgcatgtacactcacccatcacaggaccagttctcagaatagagaggtacctgttgaatcatccaccctacttcctgcctcgtgtgggcatgtctccaagtgctgagccatccgcttcgctgccgtggcctgagatatatcaggatttgcaggcctggcgacaggagacaaaatagattcccatttccttcagaaccatttagctagtttagagagtgtttgactgtttcaatgggatgagcaataaccaggcctctccttggctccttctctctgccccatatgttttcttctgttggaagctgggatttggggtcttagggccaaagataaatactgattttggctcgatctggccgcacagctgtgggctagtaggtgcccctctctgaacctcaggcccccactttctgcagcacagtgttgttctcatctctgttttttttttttttttttttttttgagatggagtctctctctgttgcctaggctggagtgcagtggtgcgatttcagctcaccgcaacctccatctcctgggttcaagcaattctccccacctcagcctcccgagtagctgggattgcaggtgcctgccaccaggcccagcggatttttgtgttttttagtagagacagagtttcaccatgttggccaggctggtctcgaactcctgacctcaggtgatccgccctcctcagcctcccaaaatgctgagatgacaggcatgagccaccgcatccggtctctcatctcttcataccacatgccttggttcccactgccccggcgggtgcctggagagccttgtggctggggctgagtgaccgcaaggtgatatttaaggtggtctcatggagcagtctgacatcactgtaatgcaagcagacatctggggagtcagactgactgaatttgaattccagcgatttaaatttttaccactgttgtgtgaccttgggcaagttgtgtgaccatttgagccatagcttcttcatctgtaaaatagatggaatcatagcatgtaccacttcgggagggagggagaatagaattaggtcagattttatatgtgacatgcttaaggcagtgcctggcatgcaaataagcccttgatacatgccagtggggttactctggttaccagaaacttggaagtaggggctttggctggggcaagatctcgcaacatttaaaaagcaatcactgaccgggcaccgtggctcatgtctgtaatcccagcactttgggaggccgaggcaggtggatcacgaggtcagaagatcgagaccatcctggctaacacggtgaaacctcgtctctactaaaaatacaaaaaattagccgggtgtggtggtgggcgcctgtagtcccagctactcgggaggctgaggcaggagaatggcatgaacccgggaggcgaagcttgcaatgagccaagatcatgccactgcactccagcctgggtgacagagagagactccgtctcaaaaaaaaaaaaaataaataaataaaaagcaatcactggtcactcgtgaggaaccaggccccgagttggtcactcagcgttcaggtggagaccttgccatgctatcaagtaacctagagtctatttttttttttaagatggagtttcactctgtcgcccaggctggagtgcaatggcacgatcttggctcactgcaacctctgcctcccatgttcaaacgattctcctgcctcagcctcccgaatagctgggattacaggcacccgccaccacacccgggtaatttctgagtagagactgggtttcaccatgttggccaggctggtcttgaactcctgagctcaagtgatccacccgccttggcctcccaaagtgctgggattacaggtgtgagccactgtgcccagtcaagtaactcagagtctaatggggaaagtagatgtggctaatccaggggctgcaatacctataaagtccttaatcaaatatattttgcgtctatgtttaaaaagcagatttcacctaaaaatctagttttttggcttctcttaagatctggcaacaccgggctggccttcctgcgatacgagaagaagctggagctgaataggagttgcccccttggccaggggctctctactttgcctcagtccccactactccctattgcaccagattcaaacttcttcatagtcatgcatgtttgccgctggggcctgtgggagtttgctgataagttgcagtgcaatgctgtgggtgctgtgagagcacgatgagcaataataactcagccttgggcagtcaggaaaagcttcccaagggaggcgaagtcacagctgcttctctataaaacctgcagatgctgctgaacaccctcatctttatggctcaaggacatgaataaaggacgcaaagtcagagctcacgaggaatctctggcataaagcgactgaggcccagtgacttatctcgggtcacacagcctgctgatggcagaagtggggctagaactaggattaccaaccagaaacctttttggactactttccctagaaccagagctgtcaaccagaaacagttctgggccactctacctcccctgtctctggattcctcgggagttaggaggatttgtactctggaatcttagacttgagtcctgtctctgccatttacttgcagtatgacctcagatgagtcacttcctttccttgaacctcagtttcctcatctgtaaggtagagctaaggattctgacctcaaaggagtgttctgagggccaaacgttgggaaagtggacaggaggcaatctcagacatctcattagctcaagaggactctagatacctgagggtcattatgactgttgacaagtagccaccttctcccaagagattttgttaccatctgtttaacagtgaccttgaaggggatccatcccccactttgcccttgccagtcccttaaaggagcacgcatggcctttggtcaggcttggaccctggaagggaatgctttgggattctctgactttgggtgtgaactgggccctggatgcagagcccaagggttcccctctcctgggaggctccaaggtcacagcgagtactagggtagagttgggaaggaagcagaatttcctgggcaaaagaaatgtcaataattcttttgttttcttcaaggcatctacctgcctatctggggctccccttaaatcccatgtctgtggctggaactattgagactctcctactttgaggaggtcccactgtcctgagttcaaatcctgacttttctccttattagttgagtgtgactttggttggacaagatttcaaattcctctaaactccaatgtcctcatctacaaaatgggcctcttaagagtacacatttggtaaggtttagtgggaattaagtgagattatgtgtgaaagggtttagcacagtgtagagctcagtcaatgcccgttattactgtgattggaaattagaatgattgccacccatcgtgtttgtataacacttgaccatttctgaacttatgcttctcttacgccatttgatcttcgcaatgactctttgaggtggccggtgcagggatcatgacctcattgcacagatgagacaactggagctcagagaaggcaaccgtctactcaaggtcacacagcttgagtatggcagagtggcagagccaagttcacttcttgttctttttttttaagatggagtccggctctgttgcccaggctagagtgtagtggcatggtcttggctcactgcaacctccgcctcccgggttcaagcgatttcctgctaatttttgtatttttagtagagaaggggtttcaccatgttggctaggctggtcttgaacccctcacctcaagtgatccacccgcctcggcctctcaaagtgctaggattacaggcgtgagccaccacacctgatctcaagtcttctgagatgaagattaaacagcaccttccacagggtcagaccggacgagacaagaccaggctttgaccacgtggttgggttgttccctgggtgcttcatatctcccaaaaactccttgatagaaataatccacaatgctgtttcaaaccctttttgcctctgtttatgctctgagcctgtaccacctctaggggcgaagaaacttctcctttctccgtggcgtcaaacggacttttccttgtatttgtcctaaagggacctcagcagcccctccccgttgggtccgtcaaagcactctgccagaaggtctgtgtgttcttcagtgtgggcacatgatggcgctgctccacaacgcatgaaaaatcaggcccaacccacccctcaccccccgccccccggactgcatttcaacgcatcaaagatcaattaaacacctactatgtgcaagtgactgtgattgctccggggagggcttcagttattcaatactgttatgtttagctatattaataatagccgtaataacatcggtacagggcttcatagtttatcgagcaatttacgtggattatctggttctatctgccaagcagtcctgatgcgttagatcgggtgggtctttctgtcccacttgaggaggaaactgaggcacggagggtgacagaacttatgtaaaggcacgggggagagaggcacatggtaggcatttgatgaattataggtggtggatggaatgaggcagacccaggcatctatctcctccaggttgttattcatcagtgagggccgggattgtatcttatttgtctttccatccccactcctagcacggcttctgattgagggcttccacagacctctgtggcagggagaggagaggcagggggattccctgtaggctgcaatgccgaacagctcctggaaggctctctgagggtgtgcaggctgagagaggtggcttctgggctggagactgcaaagagaggaggtcactgccttcaccgtgtagcatttgcaggacatgaatgactcaccgtaattcagctcctgaaggcaccaagtagctgagtggtcaggatgattcattcattcattcaacaaacgttttctgagtgcctgttacatgctaagcattaagaatgcaggtatgcaaacacagcctctgtccccctggagcttccagagcagtggaggagatggagggcaaagagctagcaatgcggtttggtttgagttgcccagaagtctgtactgagtgccacggggtaaccaagtctagtggcacagtgtgaaggctacaagagggggagatgttttgcaggatttgaaggatgaaatgaatttgcagataaccagacaaagaaaggtgcatgaggactgggggaaggaaagcatcaggggcagtggggtatgtacgggcaggagctgtcaaagggcgtcagtcatgtgtttgaggatgggtaacagatgcagtaggaaagacagtggtaccagcagggagggccttgaaagctattctgaggactgtgaattgcatcttgtatttgtcagggaatcaccatgctgggagctctgctaggagctcagagttccatggagaaggtgggcaaagagaggcccatcactcatgtttactgagccttgactatttcgtggtgctaagcacttcttgggccttggtttattgtctgtcttataaggcaggtactgtgatcatccccattttatacacgagtaaactgagacttgggatactgacataagtttttcccaaggtcataaaactggtactagtggagtcaggacttgtcttttttgttttttaatggtcacctttactaaagctgaagtgtatgggtttttcacggatggggtacaaaattcaaaaggctcaaaaagtcccaagtgaggttgctcttctttttttttttttttgggatggattctcgctctgttgcccaggctggagtgtagtgggatgatcttggctcactgcaacctctgcctcctgggttcaagcgattctcctgtctcagcctcctgagtagctgggactacaggcacatgccaccacgtctggctaatttttttgtattttttagcagagacagggtttcaccatgttggtcaggctggtcttgaactcctgacctcgtgatctgcccaccttggcctccctccctccccagaggtgactactcttacactttcttgtgttttttattttctagagactttgcctgtttgttttgtgagaggtgttttatatagacataagcacaaaaagcaagacaagacaagtgcctgttaactacaaacatgggctttgggaagagccagtgtgggtttagatcttgactttttctgagagcctgacaagtgtcaccattaaatgctggtttggacaaagggtgggcgggcttggagggtgggatgaggatggcagggggtagggacgtggacatcaagaggtctgtgtgcacaagtgtgactgtgtgggcctggactgggggtgaggtgatcagatggggacaggaaatggggactgcagaggcctggtgagagacagagcagggacgaggcaggggagagcggctgctgcggggctgtcatagccggcaggcgtttggcagggcagaaggcacagtaagaggaagagaggcagcctgcgggcttggcttgggacagcctctctaaggctcgtgctgactctcgagcagttccagctcagcaggccatgcacacgaaccaggaagctgggtggactgggctgggaaggaggccatgggctcaggagcccgggagatctggtcccagtgcccagtggggattctgggcaagccaattcctctccaggcatctgtgcgggtcagcgccacacggaagcccctcgtccctgttgatcttcactgtagagggagaggcagggaaaggcttgggagatgccgggctgggatgggctaggggcttggaatgcctgcccagaggttttcagggcggcatctcagcaagtgtccacagtgtgcagagctctcccaggcaggatgggcacctatacatgcatgcatatgtgtactttacatgttatatgtaatacaatgtaatacatgttattttgctcggttcccacttccccttttagaagccagttgatatataatgagttggtgtcctcccattctttttgatgcattgaggatcctaagtctgtgccccagtccccatagtctgttcacttcctggcttcctggaagaacaaaatgtccccgcctcctctcgttctttccctgccccactcctagaatcagctgtttttctaaggagcccaggttttcttccctgagaaatgctatttgggtgggggagagggagggaagcaacaagctgtgggggaagagcctcgatctgggcaacccctttgctcttgtgacctcgagcaagtccctcggggcattaggggaccagttatgtcctttctagactcacctgaggccaagaagatgtgggaaacatccatcctgtgtgcctgcggtctggaaaggcacagccccagctctgcccctgtgtggctgtgtgattctgggtttcttaacctctctgagcctcagagtccccatctgtgagataggaataacatgaggcttttttttttttttttttttttttttaagacagggtcttactctcttgcccaggctgaagtgcaatgacatgatcatagctcattgcaaccttgaactcctgggttcaagtgatcctcccgactcagcctctcaaagtgctaggattacaggcatgagccactgcatctggcacgtggacatttctgacttatctcaactagggaaggtactcaataaatgctaattcccttcttcctccccttaattatttgacttcagtaccccaggaaatgaggactgggatattggatggtttgggagaggaggaaagaggtgtccagggaaaaggaagaaattgggaaatagaagaccacggacaaataaaagaggaggggttaattcagaatagggaagacgggccaggcgcaggggctcacacctgtaatcccagcactttgggaagccgagacaggcggatcacgaggtcaggagttcgagaccagccttgccaatatggtgaaaccccgtctctactaaaaatacaaaaattacctgggcgtggtggcactcaactgtagtcccagctgctcaggaggctgaggcagaagaatcgcttgaacctgggaggcggaggttgcagtgagctgagatcgtgtcactgcactccagcctgggcaacagagcaagactccatctcaaaaataaaaaaaaagaaaagaaaagaatagagaagatgattttaatcatcagagctttccaataaaggcaggctctggctgcttgggggaggttgagagcctcctgtcattagaggtatgcaagtagaggctgagggattgtgagccacacagatgtgtttgtgaggactcgcaatggccaggaggtagattccttcactcagcaaactttgggagagggctgtccttgcctggtcctgtaatggggcagggaagccaaggtgaataggacaccatccctggccccagggagcgcccagcccaggaaataagcaaatcgctgagatccttttactctgcagttctgtgctttgaagcatccaagccttggagggagttggctggggattttcagtgtgcgccttttggtattgatccactgaagttggagctggctggggaatggcaggaggacgccgcagtgttattagtgcggaggacacgctgtaatctgtcagtgtcaccccggttgcagctggccaggaaccatcctgctgttaacgcctcccttcccagcagccatggagcacacaacttgtacagcacctgccagtgcctccacctctccttgtaggagggagagtgtggatatttattctttttctgcatctccctagcatgagtcctcgtctccaatcacactaatttattcagtgttttccaacacaccttgggcattcctacctctgtaccttcagttaccagaattccctaccagcggtggtcactcctgtccattcatccatccacctgtccatccatccaatcatccatccatccacccacctatccattcaatcatccatccattcatccgtcatccatccatccccccattcatccattcaatcatccatccatccattcatccatccacccacccaccttccatccattcaactttgcaatccgcttcagttcaattcaattcaattcacctttattcaactcataaggttactgggctttgccatgtaccacacacatgtgataagtgaggcatgcctctgccctcaaggagcccatgggaagaatcctccccattctccatggccagctttgcatctcacctctgttaatcctttgccatgcccttcagcagaagcaacggactctgaagggctgtcctgtgaggagagttcagttctggctttcatgaattgcagaggacagagctcagacaaggagagaggcaaagggtggggaggaggtgagagtgagatgagctagtgggacggggattttggctttgtggagggagctgcttccagttagctgtgagtactcagcagtgtattgggggatgaagggaaagagaagggggcaaggaaaccactattggagaagtgggttagtgtggcggtgaggaggtgagctctgcagccaatggactacctggcttattgtctcagctccaccatattcctgctgtgtgaacctgggcacatatcttaacatctctgagcctccatgtcctcatttgtaaaatgaggataataagacctatctcacaatgttgcctttagcattaacacatgcagtgcttaaattaatgcgtggcacaaagggagagcttaatagattccagctttggttgtgactactcctattacgtaccagctactatgccaggagctttcattccagtgtgtcctctgagctaaccctatgcggggattattgaacccattttgcagatgaggaaatgaagaccgacggaagctatctcttgagctcgtcatgcagctggcgaagggtggagcagggcttcaaatgcagacctttccaactccattgtccctgctctcctgcgtgccctttcctgccttttctcaaggggtgagtgctctgagatgcaaagattggaagacttccatcccagcttctgcctagggcactcttttggccttctctagttgtagccctgaattgttaattactgtttcatgtatgttttctctgctccccagagaccatgagatcaagaaaaaagattttcttctccacggcaactgaagtgttgactttgacagtgaaagctacagagtgtatgatgtttccctttttgccttgcttgccaggaagcttgtgctttttgtcaaactgcttacttcccctttccatggttttggtcttctacctttgacagacttttattcataagtcttactgtaagctgttctactcatagaataagctgaataaatagaaattgaattgaatggaaaaggatgggttacaaattacaagtaaataattcattttatatttaatttaatttatttatttacttttgagatggaatactgctgtcacccaggctggagtgcaatgtcgtgatctcactgcaacctgcgcctcctgagtttaagtgattctcccgcctcagcctcccaagtagctgggattacaggtgcccatgcctggctaatttttgtatttttagtagagatggggtttcaccatgttggccaggctggtctcgaactcctgacctcaggtgatccatccgccttggcctcccgagtgctgggattacagatgtgagccactgtgcccggcctgcaagtaaataattcaaataaaatcacgagcttcaggaaagaaaaatgcctttcttatatcgggccattgccacagtgtttagccctgagccctggttctggctgggtgaagtttgcatggaaagcccagtggtgattttccctgttgtgtctggatcagtggctctccttgcacctagaatataactcaaaggccttccctttggattagagcagcagtccccgacctttttggcaccagggatcagtttcatggaagacaatttttccacatactgggtgggaaactgtttctcctcacatcatcaggcattagttagagtctcataaggaacaggcaacctagatctctctcatgcacagttcacagtaggactcatcctcctgtgagtatctaatgctgccgctgatgtgacaggaggtggagctcaggtggtaattctccatcacccgctgctcacctcctgctgtgtggccctggtccaaggcccagggattggggaccccgggattagaggactgacccctgcccacctcttccaccttatcctgtgtaacttgtccccttgctcacccaggataactactggagtcatctttgagatgttctcacaagccaggttctttccctgcttcagaaaagaggctttgtggctgggcgtggtggctcacacctgtaatcccagcactttgggaggccgaggcaggcgaaccacctgaggtcaggagttcgagaccagcctgaccaacatagagaaacccggtctttactaaaaatacaaaattagctgggagtagtggcacaagcctgtaataccagctactcggggaggctgaggcaggagaatcacttgaacccgggaggcagaggtggtggtgagctgagatcatgccattgctctccagcctgggcaacaagagcaaaaactacgtctcaaaaaaaaaaaaaaaaaagaaaaagaggctttgcatgtgccgttccctctgcctggagccctctgctctctcccatcccctgcttctgcctggctcatcattcctacgcttcaaatttctgctgaaagtcagcatcttagggaggcctcccctgactgctctgtttaaaggggttgtggtagctggtctgcaaagacaactcccagtgcttcctggcctctcctgtgtatgctgctgttcccatcaagaaacagactctatttctcctcctcctggaagtgggccgggcgttgggcctggctttggccaatggaatgtggcagaggtaatttactgaggcttccgaggtgaggccttcagatgactggcagcttctccttcctgccacctggaacccagctggtatgctgtgggaagcccatatcacatagagagacacagcgggagaaatggggtgttcagctcaacagcccagttgaacccccagccaacagtcagcatggattccagccatgtgcgtgagccagcctgggtgctgcagcccaggtgagcccctgaatgactgcaggcccagctaacatcatacggaacagaagaaccacccaactgagcccacagaactgtgggagataataaaatggtattgctgttttaagccactgaatttccagtcatctaaagagaggttaatccctgataaatttctctctttctctctctctctctttttttttttttttagagagacaagttctcactacgttgcccagactggagtgcagtgactgttcacaagtgcaatcatagtgcactgcagcctcgaactcctagtctcaagcatccctcctgcctcagcctcctgggtagctgatattctaaaaatcattgccccaatgcacttacttcatagcattcacaataatctataattatataattatttgattcttaacttgctaattttcccttttttctttttctttttcttttcttttctttttttttttttttgagacagtctcgctctgttgcccaggctggagtgcagtggcatggtcttggctcactgcaatctccacctcttgcattcaagcaattttcctgcctcagcctcccgagtagctgggattacaggcatgcgccatcatgcccggctaattttttgtatttttagtagagatggggtttcaccacgttggccaggctggtttcaaactcctgacttcatgatacatctgcctcagcctcccaaagtactggaattacaggcgtgagccaccgcacctggccaattttccctttcttcctatagcacatgagttacagaaggctgggaccatgtttgtcttgattgcagctatccccagcattaagcacagtgaatggcatgtggtgggagctgaaagaatgaaagaatgaatgaatgaatgaatgaatgaatgcaaggcatcggagtggtcttgaagtgttcctaagagccagtgtaagtctctgtggctgcagcccaggctgatatagcaccagaaaggagatgggtatggcctaagtctcagttctctggggctttcacgactcagaactgtacaacactccctgacaccacctctataacccagatctccacacccctgccaggaagaatcacccttttccttctccttgcccttctgtatcctgcacagctctccattaggggacccgacaggtctccgcgcatgctcgtgtgtatagatgatggaagcaggacagaataatgggtatgaatgagggctctggatccagagacccccacctttgaaccccagtccaccacattctaaggatatcttggtgccatggctacagatattgagtgttcactcacataggaagtgctgtgtaagtgtgagcttacattacaattgccatgtgccaggcactactctcacgtcttgaattcatttacttcatacaaccttataaggtggttgctattatcattcccctcttacagatgaggcaactgacgtgtggataatttgcccaaagttgcggatctgaaccctgccaatgtggctacagagcccaccttcttcttttttttttttgagacggggtctctctctgttgcccaggttggagcgcagtgatgcaatcatggctcactgcagccttgaactcctgggctcaagtgactcttccatctcatcctcccaagtagctaggactgaaggcgtgcaccaccatgcccagctaatttttgtattttttgtagagacagggtttcaccatgttgcccagcctggtctcaaactcctgagctggcgtgatccacccagcttggcctcctaaagttctgggactacagccgtgagccaccgtgcctggtccagagcccaccttcttaaccctcatactgcctctctcgttctcaaggtagaaccctcgttctgcctccctgagcctcagttttcatacctataaatgggataataatgcctgtttaatagggctatgataccatgatctggcagtgcctgacacattgtagaatctcaataaatcccaatttgctgtggcaagatagatgaacagacttccaaaccaaggagggctttgaagctttactgtgagggtgctagagaaccactgaaagttttcgagtaagacaatgacatagtgaagctgtggcttagctccagtcctaccttttcccgcctctgtccccccaacaattagctctatgctgcctgaggttggtatctgagtttcacatccctgtcttacctccccgtgaggtgctgagatttgaactgtttcaggatcgtgatagttcatcccgggcctggaatgaatggggtgggagggatgttcttgatcttgtgggactcatctcaaagggctgcctcagagatcccatctggggccccatttctgtctccacctccagccctactgactgacagaggtgcctgggtttcatatgactgacttcgtattccccttggaatcccttctgcagcatagtggatgaggtgagacagaggctggtaactcggtggaagagagaggagggagaaaaaacaagggagccagaacaggagagagtgggagacagggggacagagagagagagtggtggagagagggcgagccagagtgagggaaagatgggctcactgcttcagggcggggtgcacctggtgacagaaatgggccacctgaccttgtgctgtgttcccttgttctgacagatatggtgaggccatctgaccttgtgctgtgttcccttgttctgatggatgttgtgagtctgtgtgggtgcacaagcatgcacatgtggtctgtgtgtccacatagatgcgagcgtctgtgacatagcatgcaccctgtctgctggcctgtgcatggaagtgcacagatgggtctccaaggacctagggactaagcatgtggagaaccatgtgcagtgcctatgtacgtcctcagccccagcgtcacctcctccatgtgcctcaccccctattcgttcaccctcctccccctgtggtggcattatcacctttcttggtcagtctctgcttacctgtccctgtctctgcctctattgagagcttcctgcaggaaagtccacatccttgtcatccctgtactcttggcagcaagatcaaggcttgctggggcaggtgatcaataaaggctgatgactgattgagtatatttgtgtgaatggatctacttccagaagcgtgtgtgggtgtgtatgtgtgtgtgtgcacgcacatgtgcacacatggaaacatgtatgtggccatacacaaatgcacatgcactgtggggtgtggatgtgtctctgagatgtccatgaatgagcctctgggcacacaccatgcccacagattgatgcagtgatatgctggcaaatgtttaacaaccggctcttcattgaaaaaaagaatgctgttgggccgggcgaagtggctcaccctgtaatcccagcactttgggagtctaaggtgggcggatcatgaggtcaagagatcgagaccatcctggccaacatggtgaaaccccatctctactaaaaatacaaaaattagctgggtgtggtggcgcacacctgtggtcccagctacttgggaggctgaggcgggagaatcacttgaacctgggaggcggaggtagcagtgagccaagatctcatcactgcactccagcttggtgacagagtgagactctgtctcaaaaaaaaaaaaaaaagaaaagaaaagaaaaggaaaaataagccctgattagcagcatttgcccattgctgtagtgtaaatgttcccaccatggccgacttcaagttgctgctgtggcgtcatggaatatggagttagctgggaagagatgcacataactggctcacatgagcccacaggagttggcttcagtacacggaagtattcatgtctgtgactgcccagcccatgatgggcaggggaggcagtgcaaagttcccctggtgatggtaatgcttctttccagagctgtgccctgggggagcaggcagttgctggctgccagccagctttcaccaagcggccttagaagtcagtctaaaccaatactccttgttaggcaggtctaggcgctcaccaacacagcagcaccttccctcactccctgcagaggctttgaagtttttggatttggtgaagtcagcatgactgcaaggaggaattgctaagcctgaagcatgaatggaagagggggaaggaggaacgcttcaaacctccatctgaggcaggtggccagggatgctggaaggtctggaggccctgggccttgtgcctgcttgaagccgattcactgtgtaagcctggacacatcgcttgcccttgctggcctccacctgtgacttccgtgaagggagaggtcttctgagctccgtggcctctacctgaccctctgggagttggtccttaaactgcgctctgagtgttaaaatctacattcaaaaggcagagagaggctgtgttggccttaaacaagagcaagaggggaccctgccctggccctcctcagaccaggccctttcccacatggtgaggaattcacaggccaaggcgatgtgctcaccccaagccctaccctttgctagacactcgtctgatgcctgctgctgtagaatttctgctccaagagtcctgccgtgctggcttccagggctggctgccatctgtcctcctgaggacccatgtcctcctgccttaagcagtggttttgggaaagctgggtgtgcaggctgggatgtgtgcccactttgtgggagatgccctgaacgtgctgagtggagctggaagtgggaaaggaggaggggtgggtcatgggcagggagctgtggtcttgggttccagggtgggcttgccccatgctgctactttgaggagcagaatgcagaggaggttgagaattctaaattcaaacctaacattttagtttgtcacaaggacatatttgccaggacagaggatagaccatatttttaaattttattttatattttattttaattttttttgagatagagtctcgctctgtcacccaggctggagtgcagtggcgcgatctcggctcactgtaacctctgcctcccgggttcaagcaattctctgcctcagtctaccgagtagctgggattgcaggcgcccaccaccacgctcggctaatttttgtgtttttagtagagacgggatttcatcatctcggccaggccggtcttgaactcctgacctcatgatccaccttcctcggcctcccaaagtgctgggattacaggggtgagccacctcgcctggctgatagaccattttttaaggtcgttagttcgatgtgcagctgttaaatcttcagacttaagttatggagagtgagcctccctttctactcttgccctggaccccacaagtgttaggggtgagcctggagagagagataattgagattggtgggggcttggtggtgtggccccagcagactgaggctgagttgaacagggagttttgaacattggacccttctagagtagacttttccgggccacgtcatacagggcttaccttctcttaggtctgtgcggtgtgtaggtgtcatctgcttgccatctcctttctctggagccccaggagagctgtacagtgagtatgcttccccaacacatcttagatagcactgttatcttagacagctgttttggggcatgacaggtcatccttccaatggggcctttctctgatgtcaaaggtcaaatcctcctgttagcattccatcttgtctttctcatctcttcaagttaagagagtcccagggaccctccccattcttctgccactccatggctctcctcttcctgagaagcacccctctgcagggagccccctgagtaaactggtagggtcatgtccattccaaactgcacaatttcacgggggaaaatggaaaccctggagtgtaactgggatgttgagtggggctgctttattctaaaagataaaactcaaggacgtcatgctctctgtcttcaaatatctgaggggctgtcatgctgaaaagggaagggatttattcagtgttgttggagtgtgaaggaagaggtggattaaaattcagtgtgcagagaagacttttgccaaagagtgctgcttagcactggctggtgctatctttggagggggtgagcccgctgtcactggaggcgtgcaagtatccctaaaggatatttaatagggaactcatgatctagagagtggggggacaccctactgtacagcatctaaacctctcatccccaataatctgtagctttaggattgttttaaataggatgccaggagttgggaaaggaattaaagaaattcactgaagtgaggaccaagctataaaaaaaaaaaatctttatttcatgtaccaggattttttttttcagttttctgctttttaaaattttttttctgttaacagtctgaaaaaaaaaaaaaggactcaccaagaaaataaatggaggttagtttcttgaactggtctgagctggacatgagcaatcatccacacccctgggcagcaacgcccttgcagttccggtcctggctccttccctccggaccccctagccccttctcagccatggcgatgtcaccccacaccccagtggctttcttcaagcacacccagaacccaggccttgcgccatggaaagaagcactgatcgccttcccagacgctctgccagaattcggagaactggagctagtttttctcttcagacagtgctcgcttgggtgcggttttcttggggaccctcccttctcccttcgctctcatccttgatccctttaggtctggaatctggtgggatggcgggcaagattggggtgggagaggggtagagttcagtttctgcccagactgagggcaacttggttgttgttaccacaccttgaattgtctcccattgttctgccccagggcccatgacctccccctgtacttctgggctgggctggccgatgttctgccccttgctgacctgggaaaataactttcctttcccaggcaaaagacaggaaaggcaggtgagatgtgcaagctcaaaaagccttactagccattctctagaactccccagagagctcaacctcaggaaatgccggtgtcaagaaaaatgcaaaccgggggagactcgcaggcagaggcaggggggcctcaccttgaccttcagtcacctgggagtaacttgcagactgttctgaaatttccagctcaggaaagctgttggatttctgtcagtctgaactggcccttgtcactctggggaagaaaggggagaaacacaggatgcccttgacctttagtctgtggtgcaagtttaacttttggggttggtccttacactgggatggaactgctaaaattttcctctccattccctcagccttgagccctcccagtaaacctcagaggatcctctttttcacagacccccaaagacactggggaagccctggtggcagagctcttctcccaaggaagcctctttaactctccatgatcgcagcaaggggacacaaagtgaagaagggctttggggacccctgcgtctttcccctctttgcctgaacagctttatgtttgctcacatgtgtgtatttttgctttgacattggatgtgggggcaggtgttcggggagcacagtgaggaggtatatggtgtgtgtgtgtgtgtgtgtctgagaggctgactgatgatgagcctgggggcttggtggcagctgtcctggtcatccctggcatatcctcggggcaggtggcagatcttaagtcacagatacatagagcaagaatgggcctttagtgcttctctgggtcaatccacatgcttacatggggggaaaattaaggcccagagaggccatgcagcaaggaattccggaatccagtcctggattctagacgggtgcccttcccatgcatgcgagtggtgtgtgtgtgtgtgtgggtatgtgtgcgtgtgtgggtatgtgtgcatgtgtgtgttcatgtgtatgctctgttgggaggttgtgaatgaacacaaaggccagtgtggagttgttgtcgtccatggctttggagggcatgagtcaatttcctttgagccacgcccctggccgtgtatgggatggaagggttgagactgagtgtgtccctgtgagtgactgcagtgctgggctaagtggactgtgtatgtgtgtgtgaacgtgcctgtgtgcgtgtggggtgtgtggtctctttctttgttggattctgtcttcccccattcgcagcaccttccttgtctgaggaagccacctttccatcacagagaccccctgcagctcactgggaccttccgctactccctccaaccttcaagcccagctctcacctctcacaacggttttgctttgtttttgtaaatggatttgtatattcgttttctgttttttttttctttacaagttccctgctaaagtttaagtcccccaccccgccccattttttgttttcacagtttaaagctggaaaagaattaaaagaaaaatactatctgattttcttgcaagtaaatccacttattttgtatttacatttatttatagtctgtggtttttttattaaaaaaaaatcaccacttgtttttcctttttcttttgtaaaaagaagcctttttgcagtgtcattgttgaacccgctgggccccaagggggcatcagtgagtccaaggacccccaaagggtcaatgaacccccttcccaggggactggggggcttatgagtcagggggtccaccatcgccccagggtcatcaggtggccctgaggtgaggggtgaggagggagagctgtttcatgtcccccgggggggggggtggcatctcctgaccccaaggacaggagcttggggacatgaccccaagaggctcaccctgaggattccggggtttccggcatcttggtaagccaccggcagcctcccctctccttccctttcctcaaggcctaggaagtcatcacagtgggttaaggagcattaaggactgggaacctggggccaggcaagccccaagtgtacccccctccaggcaccctaacggagaggagggacaagggctcggtcacctggaggcctacgattgccccatcaatgctgggcggagccggctcgagctctgagccttcctggagttcctggggcacccacccaggggctccagggacctggcagtgactgcaggctcacctggccccagggcccctgagtctcgccccccaatctcccagggaggcagggcccgctgggggttaaagggaacagaaaagtaactctccccgagttaaaaaaaaaaaaaaaaagtaacataaaccctgaaaaatacaaaggacatcccctttcctttctgttctcattttttttttttttgctttaatgttatcttggttcccttttattttttcatttaaattgatttttattaaatgttaaaataatggtacatgggaaatcatgcattttcttttagatttattttctatttttaattttttatccctctcgcttttttttaaagtttgttttcttccctcgtttatattttcccacatttcctgttgttttgcttctttgttcctcttatattttgttcttttttttaaaatttacttgttatgttttttctctttttttgtgtgtgtgtgtttttttgttttttgtttttttgttttttttgttttttgtttttgcttttggaaggtctcccagcggagggtctgggtctccccgccccgccccgcccccggggaccgcgccctcctcccgcggtcttctggcgaggcccgcggtctttatacgggggtggtccggcggttggctgtgttggagtggagagagtccttgttctccttctggatacagttgtgaacctggaggaagctgttatccctgtcggagttgtaggtggcggtgggcgtggtggcggccttcagggggtccctgctgagcgtgtacatggagatctccgtggacggcagggtgttgaagcccttgatgcccacgggggaggcgtccctggagtgtgagggctccgtggagcgcgagctggagcggctgcggcgctggtagcggtagcggtagctggggatgcgggtgatggcagaggcctggaggtagtccgtggcgcgggccgtggcccgcagctgtttgtgccggtcgataaacatgtgcaccgccagcaccccgaccatctcggcgatgatgaaggacagggccccgaagtagaaggaccagccgtatgagtaactattctttttggagtcgctcttggaggggtctccggcattggcagatatgtacactatgatgccaatgatgttactcagacctgcggggcgcagggtggcggggtgggggatcagagagaaggacgttagtttctcaggaagtcggccacagggcagccgtaaaggacggggacagctgtgtgggccttccccggtcccgcgccttcatgaacaggtggggcggtgtagatggacatccgcaagcttccccttaacattttatctttccattcagagagagccacaagggaagcgctaatggaaacagacatgggcagggcgggagaagggaggcatttcacaaggcgctgagtaactaataatagatattgttcattgagccttctctacctgctttcactgcttggtgcttctcaagcagggcacagatgaggaaacaagcacagagaggttaaggaacttgcttaaggctgcacagggcttcaaagctggtgtagcagcgggtgaaggcgggctgatggagccaggctggcctgcgttcaaagccttcgcaagttaaccttggtttgagtttccagatctgtagaatgggagtaaggttaagccttactctttagggccacggagagggttaaatgggtgaatacatgtgagtactcttagatgttggtggttcctttttttttttttaagatacagtcttgctctgtcacccaggctggagtgcagtggtgtgatcacagctcactgcagtctcaaactcctgggatcaagcgatcctcccaccttagcctctctagtagctgggattatgtatgcgtcaccatgcccagctgattaaaataaaaaaatttctgtagagacgcggtcttgaggcctcgctgtgttgcccaggctggtctcggactcctgagctcaagtgatcctcctgtctcagcctcccaaagtgctgggattgcaggcgtgagccactgcacccggcctgatgttggtcattcttattaaatggctcaggctacacccaggttctttttctggcatctgaagtgagtgtgactcatctgtcatgtaactgggctcagacatctggatgtgggtgcctgcctgctcccacctgagtagaacagtgaggggagagtccacccttggtttccaaggtgaagctgagtatcccataggggttggaacagcgaggcacttgggtgccctctctccagcctcctcatgggtttacttgcaccgggaagggaaagggtaagtggcaattggccaagtaccctgagaggaagcgggcatttgggccttttctcaagtggtgggaagaagatggggtgtggggatgctcctggaggatttggtacaggctcgggagttgctacaggacaggagcccccccaccaccttcctcccctgcaacacgacctagtgcaagtcttggagatttcctctcctctctccccatctctctctgccaggccctcgtggcccctgagcacccacaccccagccttcttcccagtggcaggactggatcagtggctgttacctgcagacacgaagaagatgccggcactcaggatgatgttgtgtcgagttttgtagaactcgctggctgcgatgcagaggccacccatgaaaagcagaatcacactcaggattgggaaaatgctggaggccctcacggcccctgtggaacacagagggtcagggagaaagagaacggcatggctgtgagactgaggcacacagaggcaggtgggagagcagccccgaggcgctgggggtttatggacacagccttagaggagaggttgctttgcaatcctagggagggagagacagcgagcaggccactgcccagctcacagccctgcaggagctccccactgcctccagggccaaactccagcacaccgtcaggcacacagggccctgtgtgacttggcctctgcccacttccagctcccacggctcccagtcctcatgttctctctcgtcccaccacatcaaacttcccacgacatgtcatttcatgctgctgacttttgaaatacagagcttcctactggaatgtctttcctattcttcactcagcaaactcttcttcatccttcaaaacccagctcgaagtcccctcttctgtaaagccttccctgacttccttaggcaaagttatgagctccctcgtctgcactttggggcccttgggcacgctgagaggcagtgtggtatagtggttaggtggaaccacgtgggttggatttgagtctggctgcagcatttattagctgtgcaatagaaaaagtatctcacctctgtgtgcctcagtttcctcatctgtaaagcagggatggtaataatgccaagctcctaagattgttgtgaggattaaatgagttgattcaggcaatgcacttagataagtttctggtgtctataataaacattcaatgcatgatattataataaatatttgtgtatacatatgcttccaccatgaaccatgggtcgtgagacaaggactgtggctttacaaagaaaaagtttcttgtctttatcctctctgttcaacgacacagtagtctgccaatagaagctcattaagtgaataaatgtggggtcgtggtccagaaggaaggaacaggcacattgcaaagaaaacaaagtaagaagagaaacccctctagataaggactgacaaacaggaccggagaagaaaagaatatggtaatgaaaagggagaaacagaaggtgagggccagggctcctacagttgggggtggatgggggaaaagggggacaggtggctaagggcagaggtcggggctacatgtgtttgtggggggagcagcacctgaatgaggacccagaggtgttggggagcccttcacaaagtgtctttgcgaagtaaaacattttttttttaatccaaattcaaataggcagtgagtgacctcaggacccagctccgtgtcctgggagccatgggctaggcaggaggcagagctggcttgaggcaggggtgagggaaaatatgtcttctttattattattattttttgagacggagtcttcccctgtcacccaggctggagtgcagtggtgcaatctcggctcactgcaacttctgcctcctgggttcaagtgattctcctgcctcagcctcccaagtagctgggactacaggcgtgtaccaccatgcttggctaatttttgtacttttagtagagatggggtttcactatgttggccaggctggtctcaaactcttgacctcatgatctgcccaccttggcctcccaaagtgctgggattacaggcttgagccaccgtgcctggccaaagatgtcttctttaaatggtgcttaagtggtttctaaggaagttgagtcctgataattacaggaccctttggccaagcccagggattggtcagggaggttggttttggaggggaatgtgccaggagcggagcttcctcttatccccatccccgtccccacccttttgggtgggagtgtgttcaagaaggatctgtgagaagagaatttctctatatagaactgtagggatttttctttttcttttttaaaatttatttttatttttattttttgagatggagtcttgctctgttgcccaggctggagtgtagtggtgtgatctcggctcactgcagcctccacctcccaggttcaagcgattctcctgcctcagcctcccaagtaggtgggactacaggtgtgcgccatcacacctggctagtttttgtatttttagtagagacggggtttcgctatgttggccaggctggtcttgaactcctgacctcaagtgatctgcccgcctcggcctcccaaagtgctgggattacaggcgttaaaaggggattttaggcagtttgctgagatgtgtgtgatgtgaaaactcttcttctgtcctcaccatggatctgcagcatagtctacactgctcacaaatgggtgagtgggttatttgggggggacctgaagaagggcagggctcttggggcaaaactgagctgcatatagggaagcaggggtgggaggatgggggcttggggtggctgggctactctgcagcctcagcaccctccttctcttgggcgggatggggctgctcctccacagaccccagggaggtgttctctccttgcaaatcattgctaagacaacacgctgtatccctaacctgatcccccagcccaaacacacccacatccacacccacgcgtgacagacatgcatgactaaaaagccaccttaactctcatctttataagcacatgaggatggtgagagcttactgaaaacccaggagaagagagagaatatttgttaaacacccattcggtgttgggtcttgagcaggtacctaacatatatgatataatttcatcctcataacagtccggcagggtgtgtttttttgccccaatttacagacaagaaaattgaggttcagagagagaaactcccctgccacccagctagtgaaccaggattcatatccagaccagctcaacttttggagcaccctgtagtctccctatgtggcttccaaggagcccaggaagggtgagtgccacagggcctggagaactgggtttgggtcccacctgtgccactcacttgctgtgtggctaaggcgggtgctcacttcctctgtttttcccctgtgtaacatggggtatggcctgttagatggtttctttttgtttgtttgttttagatacagagtcttgctctataccccaggctggagtgcagtggcgtgatcttgactcactgcaacctccgtcttcggggttcaagcaattctcctgcctcagcctcccaagtagctgggattataggcgcccgccaccatgtccggctaatttttgtatttttagtagagatgggttttcgccatgttggccaggctggtctcaaactcatgacctcaggtgatccaccggcctcggccttccaaagtgctgggattacaggcctgagccaccgcgcccggccgttagatagtttctaatagctctgccctttccatgtggacatggtcctggccagccacaaaggggaatgacagaagagagaaggaaagaaagaaagaggtcggtgtggcttccgaggcgcagcagcagcagctcagaggaacaggcagaagaaaggctctggccttccccctccaagaaagtggggtcttactacccacaggatgcctgcaggtcgccgacccaattgtgccctcacagcaaatggactcacagcagcccagggcttgatttttccagttgagccccatctgctgtgggaacccggatgccccagctcagccctcctgccagcagggggagggagcgtcggctgcggagggagctgggatgcatgcgtgtgggcagccagaggccaggcatgtgtggacaagatggagggcggcgggagagcagggaggggtctgctgtgttgcagccagcaaagagcaatgtggaggaatcagaacggcttcagaagccaccaaggcagcgtatgacatgctctaaataatgaccaccagcggggaatacaaacagaagcctcttcggcacagaagagccagccccaagctctggcctttcgtggaagaggcctctttgcccagaaagaaggcaacaggccgggcgcggtggctcacgcctgtaatcccagcactttgggaggcagaggtgggtggatcacctgaggtcaggagttcgagaccagcctggctaacatggtgaaaccccgtctctactgaaaaaaacacaaaaattagccgggcatggtggtgcgtgtcagtagtctcagctactgggggtgctgaggcaggaagatagcttcaacttgggaggcggaggttgcagtgagctgagatcgcgccactgcaccccagcctgggcaacagagcaagactccatctcaaaaaaaaaaaaaaaaaaaaaggcaacagtgggcaaccagcaaatagcaccatgcttaggccactagacttggcagggcccagatccaggtgggaaggaagctggtttaggagcaagcagggacttctacattggagacgtttcttgaaggaggtatttctggctgggtagtgtcacaaacggaatggggattttggagttagtcacacttgactttgaatcctcgctttgtcagttatcaacagtgtgacccttgggcaagggtcattactgctctgagcctcagtttccccatcctgtgaaatgggaatagtaaaaataatatttagcttataggaatgttgtaaggccttgctgctgcaagtgtggcctgaggcccagcggcattggcatctgattagaaaggcagccctgccaggcatggtggctcatgcctgtaatcccagcactttgggatgctgaggtgagcggatcacatgaagtcaggagttcgagaccaacctggccagcatggcgaaaccttgcttctactaaaaatacaaaaattagccgggcgtgacggtaagtgcctgtaatctcagctacttgggaggctgaggcaggagaaccgcttgaacccgggaggcagaggttgcagtaaactgagatttcgccactgcactctagcctgggtgacggagcgaggttccatctcagaaaaaaagaaaaaagaaatgccgcccctcagctctttcccccaactgagtcataatctccattttaatgagatccccagagcaagatttgcatgcatatgaaagtttgagaagtgctgttataagaattaaattggggctgggctcggtggctcacacctgtaatcccagcactttgggaggccgaggctggtggatcacttgaggtcaggagttcaagaccagcctagccaatatgatgaaacctcgtctctaccaaaaataaaaaaattagctgggcatggtggtgcacacccatagccccagctacttggggggctgaggcaggagaatcgcttgaacgcgggaggcagaggttgcagtgagccaggatctcaccactgcactccagcctgggcgtcacagcaagattctgtctcaaaaacaaaaaaaaaaaaaaaaagaattaaattgggtcctaccttttactgtgtctcacactagaagttgcacagtaaaaggtagcaatttttatttctgaggtccctcttcccaaaacatcagtccaggcataacttccctataaattgtcctcacttcctacaaagccaagcatggtcttgttgccaaaatctatcacaagagtcaggaaatatctgatttatttaatgaacaaatatttactggtctcctatgagtaagcatatggcacttcacattacctgacaacatttatggagcccctcccctgtaccaggccttgttctaagagcggtgtaaacctcataccagccccatgaagccatgggctttggcttcaaggagattacacacgcctaaagctgacactggcaaacttgttctgtgaagggaaagacagcaaatattttcatctttgctggccatatggtctcagttgcaatttcttaactttgcagttgtagcacataaacagccataaacaatatgtaaacaaatgaacgtggttgtcttccaataaaactttatttacaaaatcactttgggaggccgagggggctggatcacttgaggtcaggagttcgagaccagcatggccaatatggcgaaaccccatctctactaaaaatacaaaaattagcccggcgtggtggcgcatgcctgtagtcccagctactcgggagcccgaggcaggagaatcgtttgaacccaggaggcagaagttgcagtgagctgagatcaagccactgcactctagcctgggcagtgggtgacagagtgagtgagactccatctcaaaaaaaaaaaaaaaatcaggtggtgggctggatgggctggatttggcctgctagtcatacttggccagctgtggccaagagtatactctatactggggaaaaggccacgtggtccagagcagggagatgctttgctctaggctagctgtgaatccagtgagcaaatatggactgagtgcccaccgctgtgctagacctgggcttggcatgagagacatgaggggtccaaaacaggcctggttcatgtctttctagagcttatactctcatgaaggacatgtatgccatcagataatcacacagcctggataacgtgctatgaaagaaaagtacctatatggcaccatgagggtatgtgacaggctaatgtcacatgtagacaactaatgtccatagagagcttagagtatgccgaggactgttttgagcactgcacatacacaaactcgttagttctcattacaactctgtgaagtaagtacttcatattatttttattttttaaatttattttagttctacttattgcattatcttaagcagcatataatagtatggcctctgaaatgtgatagacctggattcaaatccaatgcttttgttttttactttttaattattattattatttttttgagacagagtcttgctctgtcacccaggctggagagcagtggcgtgatctcggctcactgtaacctctgcctcctgggtttgagtgattcttgtgtctcagcctcccaagtagcttagattacaggccatgtgccatcacacctggctaatttttgtatttttagtagagacggggtttcaccatgttggccagcctggtctcgaacttctggcctcaaatgatatgcctgcctcagcctcccaaagtgccgggagtgcaggcgtgagccaccacacatggcctatataggtattttaattatccccactctacagagaccaaactgaagcaaggagaggttaagccatttgttcaagatttgtgaatccaggcagtctgactctagggtctgtgtgtctaaccactgcattcccttcttttcaggctctacactttgctgcccttcaaagcatcctctgagcttatgtggggatcaggacaggtctccctgaggaagtggtggtagagctgacctctggcgaataaggagcagctgattaggcacaatgaaggcagggctgtgggagagagagcagcaggagccgaaggtggaggaggcatggctccttcagagacctggaagaaggctggatcacgaggagccagtggaagagtgtggggagcactgaagggaggagccagtggaggagtgtggggagcacctaaggagaggaggcaggcgggtctgggccacgtggggcctcatgagttgagctaaagagcttagctttatcccaagagcaatgggaaactttaaagggcttagaacaggcagggctgtcatgatctgatttgcatcttaagaagcaaacggattacgaaggggtcaagggtggctccagggaagcagtgagaaggctactgcagctgatcggagaggagtgatgccggtgcttgggccagggtaggtacaaagggcatggacagaggcagatgtgtctgagagatgtttaggaggtgaattgaagcttgatggatggatatgggtagtgaagagggtggcgttgaggttaacttctaggtttcagacttgccagctgggtggaaaaaaccacttagggggactgggagaggacccagcctagcagtgagtagagagtaggggaggagcctgggcgaggtggctcacgcctgtaatcccagcactttggaaggctgaggccggtggatcacctgaggtcaggagttcgaaaccagcctggccaacatggtgaaaccccatctctactaaaaaaatacaaaattagccaggggtggtggcgcatccctgtaaacccagctacttgggaagctgaggcaggagaattgcttgaacctgggaggtggaggttgccgtgcaccaaaattgtgccattgcactccagcctgggcaacaagagcggaactctgtctcaacaaaacaaaacaaaaccaaaacaaaacaaaacaaacaaaaaaagagactagaggaggaagatc

SEQ ID NO: 59223 - DNA, 1826 bp, Homo Sapiens
aaaaaaaaaacaaaggtaaattacatgtatatatgtgtgtgcacaaatcttaaagaatagagagataagtagtggtaaacctactattggttgaatcgtgggtgtcccactaagcgtgacaccgttgttccctcatggccacataagaaatagcctcccaagttcctgggacacctcatgcacttctccctggcttattcccacttccctctagaagccaacagtcttctgaattgcgggtcagccattcgctggcttttgtcggtttcccacctttgtctggatcctgaaactgcgaatgattttggctcagttcgctgggagccgggtgtcctgcactcttgggacaccaggagcagcagttcctgtgttcccattctccatttcagtgtccaaggtggcgccatccacacataatcacctgtcctgctggcagtgagcatttgggtgggtttctgggttttgtttttgctgccttctaagtagctgacttttcacccccaagctatgcttcttgaggcagagaagtgccagtttattttgttttctgtctctaaatccagttccttaatgcaccactgagactcagtttagaagtacagtgaaactttgtgagcatttttctccctgagtttgaatggatccctctctcattctttgagttcttgggcacttgtctcttagacactttcaagttacctactggacaggagagacctcttctctataaagtatcacacttggaggcttttcaggcacaggaccatagattgtaatattttccatagcagttgcccaattttatctgtaaaaattgctttttaaggcctggcacagtggctcacacctgtaatcccaacattttggaaggctgaggcaggaggatcacttgagcccaggagtttgaggccagtctggaaaacatagtgagacctcatctctacaaaaaattttaaaaattggttgggcatcgtggcatgcacctttagttccagctactcaaaaggctgagacgggaggatcccttgagcccagaaattagagctatgatcgcgccactgcactccagcctgggccacagagcaagaccctgtctccaaacaatcacaaaacttccaatggatgccgaacgtataacttttttttttttttttctttcttggagtaaaataacttgatccttgatctttggctgtagctcctgagccatttgaggcactggggggtttgtgtgttgattacctatgaaggagcaagtgggctgtttccttctcccagcggcttcctttgaccccaaatccctgagagtctcgcccattttcttcttggcttcctccctttgatatgcccagccggctcctgccctacctggctgccaccaggacctgctggaggcggttgctgggaattatttggtgtcctgtttgaacctcgcttgccgtgctcccagatttcctgtttctcctgggcttgcctttcaggatttgcagaaccccttctcctttagaagtgtcaactggggctgggtgtggtggctcacgcctataatcccagcacttttgggaggccgaggcgggcggatcacctggggtcgggagttccaggccagcctgaccggcatggagaaaccccgtctctactaaaaatacaaagttagccaggtgtggtggtgcacgcttggaatcccagctactcgggaggctgaggcaggacagtcgcttgaacccgggaggcggaggttgcggtgagccgagattgcaccatggcactctagcctgggcaacaagaggaaaactctgtctcaaaaaaaaaaaaaaaaaaaaaaa

SEQ ID NO: 59224 - DNA, 554 bp, Homo Sapiens
  misc_feature (554)..(554): n is a, c, g, or t
agtggagatggggtttcaccgtgttagccaggatggtctcaatctcctgacctcgtgatccgcccacctcggccttccaaagggctgggattacaggcatgagccaccgcacctggccactttcagtaatattttctaatcttgttttctaacaagtaccatgcatctcagccaaactgtgctactgacctccaacacaccctgtggttttgaaactcagagcctttgcttcccaggttttacttcatctggagtatcactacctaatcacttccctctccccttgttgaaaacctgcccgtatttcaagactctctttttctatagtcatgcattttgtttcagatttatgtattagctaccttatctgggttctcatgacctgttcttacctgtcttacaacacttgatcacatacattctattttccccttaaactataaactgaaatgcaaagacatgtttttgttggggactcatgtgacagtatgccaataagatttgaaaccatttaaaaatggttggtggtttggtgattgaaaaccatataaatn

SEQ ID NO: 59225 - DNA, 3432 bp, Homo Sapiens
cccgccagcaggagccgcgcggtagatgcggtgcttttaggagctccgtccgacagaacggttgggccttgccggctgtcggtatgtcgcgacagagcaccctgtacagcttcttccccaagtctccggcgctgagtgatgccaacaaggcctcggccagggcctcacgcgaaggcggccgtgccgccggctgcccccggggcctctccttccccaggcggggatgcggcctggagcgaggctgggcctgggccaggcccttggcgcgctccgcgtcaccgcccaaggcgaagaacctcaacggagggctgcggagatcggtagcgcctgctgcccccaccagttgtgacttctcaccaggagatttggtttgggccaagatggagggttacccctggtggccttgtctggtttacaaccacccctttgatggaacattcatccgcgagaaagggaaatcagtccgtgttcatgtacagttttttgatgacagcccaacaaggggctgggttagcaaaaggcttttaaagccatatacaggttcaaaatcaaaggaagcccagaagggaggtcatttttacagtgcaaagcctgaaatactgagagcaatgcaacgtgcagatgaagccttaaataaagacaagattaagaggcttgaattggcagtttgtgatgagccctcagagccagaagaggaagaagagatggaggtaggcacaacttacgtaacagataagagtgaagaagataatgaaattgagagtgaagaggaagtacagcctaagacacaaggatctaggcgaagtagccgccaaataaaaaaacgaagggtcatatcagattctgagagtgacattggtggctctgatgtggaatttaagccagacactaaggaggaaggaagcagtgatgaaataagcagtggagtgggggatagtgagagtgaaggcctgaacagccctgtcaaagttgctcgaaagcggaagagaatggtgactggaaatggctctcttaaaaggaaaagctctaggaaggaaacgccctcagccaccaaacaagcaactagcatttcatcagaaaccaagaatactttgagagctttctctgcccctcaaaattctgaatcccaagcccacgttagtggaggtggtgatgacagtagtcgccctactgtttggtatcatgaaactttagaatggcttaaggaggaaaagagaagagatgagcacaggaggaggcctgatcacccagattttgatgcatctacactctatgtgcctgaggatttcctcaattcttgtactcctgggatgaggaagtggtggcagattaagtctcagaactttgatcttgtcatctgttacaaggtggggaaattttatgagctgtaccacatggatgctcttattggagtcagtgaactggggctggtattcatgaaaggcaactgggcccattctggctttcctgaaattgcatttggccgttattcagattccctggtgcagaagggctataaagtagcacgagtggaacagactgagactccagaaatgatggaggcacgatgtagaaagatggcacatatatccaagtatgatagagtggtgaggagggagatctgtaggatcattaccaagggtacacagacttacagtgtgctggaaggtgatccctctgagaactacagtaagtatcttcttagcctcaaagaaaaagaggaagattcttctggccatactcgtgcatatggtgtgtgctttgttgatacttcactgggaaagtttttcataggtcagttttcagatgatcgccattgttcgagatttaggactctagtggcacactatcccccagtacaagttttatttgaaaaaggaaatctctcaaaggaaactaaaacaattctaaagagttcattgtcctgttctcttcaggaaggcttgattcccggctcccagttttgggatgcatccaaaactttgagaactctccttgaggaagaatattttagggaaaagctaagtgatggcattggggtgatgttaccccaggtgcttaaaggtatgacttcagagtctgattccattgggttgacaccaggagagaaaagtgaattggccctctctgctctaggtggttgtgtcttctacctcaaaaaatgccttattgatcaggagcttttatcaatggctaattttgaagaatatattcccttggattctgacacagtcagcactacaagatctggtgctatcttcaccaaagcctatcaacgaatggtgctagatgcagtgacattaaacaacttggagatttttctgaatggaacaaatggttctactgaaggaaccctactagagagggttgatacttgccatactccttttggtaagcggctcctaaagcaatggctttgtgccccactctgtaaccattatgctattaatgatcgtctagatgccatagaagacctcatggttgtgcctgacaaaatctccgaagttgtagagcttctaaagaagcttccagatcttgagaggctactcagtaaaattcataatgttgggtctcccctgaagagtcagaaccacccagacagcagggctataatgtatgaagaaactacatacagcaagaagaagattattgattttctttctgctctggaaggattcaaagtaatgtgtaaaattatagggatcatggaagaagttgctgatggttttaagtctaaaatccttaagcaggtcatctctctgcagacaaaaaatcctgaaggacgttttcctgatttgactgtagaattgaaccgatgggatacagcctttgaccatgaaaaggctcgaaagactggacttattactcccaaagcaggctttgactctgattatgaccaagctcttgctgacataagagaaaatgaacagagcctcctggaatacctagagaaacagcgcaacagaattggctgtaggaccatagtctattgggggattggtaggaaccgttaccagctggaaattcctgagaatttcaccactcgcaatttgccagaagaatacgagttgaaatctaccaagaagggctgtaaacgatactggaccaaaactattgaaaagaagttggctaatctcataaatgctgaagaacggagggatgtatcattgaaggactgcatgcggcgactgttctataactttgataaaaattacaaggactggcagtctgctgtagagtgtatcgcagtgttgggtaagactttgaacaagcttgttctcaggctttgataagtagtgctgtttgccagctgtatattatccctaaaaataagtaataaggtatatatggtacatattttgacatgcatatacatatttgcatcctgactaggctgcccacagcaatttaagttacttgaaactcgctttt

SEQ ID NO: 59226 - DNA, 570 bp, Homo Sapiens
  misc_feature (471)..(471): n is a, c, g, or t
  misc_feature (491)..(491): n is a, c, g, or t
  misc_feature (531)..(531): n is a, c, g, or t
  misc_feature (545)..(545): n is a, c, g, or t
  misc_feature (554)..(554): n is a, c, g, or t
  misc_feature (563)..(563): n is a, c, g, or t
  misc_feature (569)..(569): n is a, c, g, or t
gcctagctccaagtaggccctgaactgaggaaacaatttggcctttacattcccttggactctccgtgtcagaatggagtgcccttgcctcccgtaaactcttcagcctactaccccatcaggcgtgtagccagatatcctcatgtagctaaatccatggacatcattctgttacatcttaagcatctcttaggtccgctagaaacagtggactgctgcctccttcctgtcttggtttctataggactgcattctcttgatttctattattcctgctaccccatctcagtttcctttgctccttgtcgcttctgtactgatctctcaacacaggagattcccaagggctcagaactagcccttctctctcttccattctctccctcgatgatatcgccatttccatggttttaaataccatctgcatgttgatttccacatccataactccagtctacatggcttctctgnccaccatattcacatatctnaccattgcttggacatctaaactcagcatggtctaaactnaacacttacaatgntctaaaccnggtctctgnttttgna

SEQ ID NO: 59227 - DNA, 569 bp, Homo Sapiens
  misc_feature (392)..(392): n is a, c, g, or t
  misc_feature (418)..(418): n is a, c, g, or t
  misc_feature (426)..(426): n is a, c, g, or t
  misc_feature (462)..(462): n is a, c, g, or t
  misc_feature (482)..(482): n is a, c, g, or t
  misc_feature (509)..(509): n is a, c, g, or t
  misc_feature (524)..(524): n is a, c, g, or t
  misc_feature (529)..(529): n is a, c, g, or t
  misc_feature (539)..(539): n is a, c, g, or t
  misc_feature (547)..(547): n is a, c, g, or t
  misc_feature (566)..(566): n is a, c, g, or t
cttttcttttgagactgagtctcattctgttgcccaggctcaagtacagtgacacagtcttggctcattgcaaactccacctaccaggctcaagcaatccaactgcctcgccctcccaaagtgctgggattacacgcataactgccttcttatacccattttacttcaaattctcatgagaatagcttctatgattatttgtccctttgatagaataaattatgttgacagatttcctggtaaaaaatcatcattacatgtctgaaataaactctagtgttgatagtctagaattcttttgatacaatggcagattcaatttgctaatattttatttttacttttgaatttatattagtgagactgatctactggtttctttattaaactgntctctggcttctttatcttcccctgnataaaggnctctattttgattcacaaggtggttctttaagtttnctcaaaaaggataaactagnatctcctttcattctgacatggtggangggcccttggctganaccanggtcctggantggaagtntttggcaccggggaacggnttc

SEQ ID NO: 59228 - DNA, 576 bp, Homo Sapiens
  misc_feature (498)..(498): n is a, c, g, or t
  misc_feature (538)..(538): n is a, c, g, or t
  misc_feature (574)..(574): n is a, c, g, or t
aaagactatagctaagaaatgaaaagaaaaaataaagtaactgatttccttgggcagcagaattactgggagacaggggttgtacactaaatattctaaatgtttctaaaaatgaaaatatattattcaagagcatgtagtacttgcaaatgatcaagcatttccaaaaaaaactgcccagccctattaaatttataaaatatttctgcaatacagctggaataattacaaggtacacaacatattacagtatttgttgtatctattatttgaattgatctacacactaacatatgaaaatacgtgctaaaatttttggaagaaaaggaggtttcctaggacacggagaggggaggttaggggcgacaactaatgagtatggcattgctttgggaggtgattaaagtgttccaatatggctgggtgcggtggctcgcgaggtcaagagatcaagaccatcctgccaacatggtgaaaccccgctctactaaaaatacnaaaaattacccgggcatggtggcaacttttgtagtcccanctactggggaagcttagccgggaatcccttaacctngg

SEQ ID NO: 59229 - DNA, 575 bp, Homo Sapiens
  misc_feature (428)..(428): n is a, c, g, or t
  misc_feature (491)..(491): n is a, c, g, or t
  misc_feature (507)..(507): n is a, c, g, or t
  misc_feature (517)..(517): n is a, c, g, or t
  misc_feature (536)..(536): n is a, c, g, or t
  misc_feature (552)..(552): n is a, c, g, or t
ggatttttagtagagacggggcctctccatgttggccaggctggtcttgaatgcccgaccccaggtgatccgcccacctcggcctcccaaagtgctgggaccacaggcgtgggccactgcgcctggcgtcattatcattttaacattgctgctgtattttcccttgtagggacaaataatatgactattttccacctccttgctccaaatcatcagcataaatagcaaactattcaaggaggacagacttggcaaggaaaattccaggctagctattatggcctgacaggttcatcatccctcttaatgaatgaaagtacgaagtgccaaaacaatgtttaattcaaaaatcatttatcttggctttataaaggaggaaaacactgagtcagacacacatctaagcacgaatttggacacaatttctncctggttttggttgacatgggcttacatgaaccccaaggagccacttttcaggccagaagacngatgatcaagggcttntaaccagganaagcttttttccaagggtnccaaagcacttttcanttacttgaccgggaaaacaattt

SEQ ID NO: 59230 - DNA, 574 bp, Homo Sapiens
  misc_feature (418)..(418): n is a, c, g, or t
  misc_feature (449)..(449): n is a, c, g, or t
  misc_feature (463)..(464): n is a, c, g, or t
  misc_feature (487)..(487): n is a, c, g, or t
  misc_feature (517)..(517): n is a, c, g, or t
  misc_feature (548)..(548): n is a, c, g, or t
  misc_feature (555)..(555): n is a, c, g, or t
  misc_feature (568)..(568): n is a, c, g, or t
agacagagtctctctctgttacccaggctttaaggtttttggtagacacagggtctcactatgttgcccagtctggtttcaagctcctggcctcaaatgatcctcctgtctcagcctcccaaagtactcatattacaggcatgagccaccatgccctgctgtaaattgttttgaacagagggtgaaataggcttagggaggaacatactgagtctgaaatagaacatccaggtggaggatcagccatcagtgagagctgcacaaaggtcatgattagagcattgactcagcttagagaagggagtcagagttcagacagccacaggcaattcctagagtaagtgaagagaacaattttgaaaggcacctgctgaagaaaagcaattattcattcctaaaaggcactggccgatccttnacattgaacatcagaaaaaggacacttctgnaacaaggcttctgnngggccaaagaaaaactcttttcnggtcctaaaaaattttcaaaaacccgaccnctttaatgggaagcttcatttaaaggccttnttaaaanaacgttccggaanttggaa

SEQ ID NO: 59231 - DNA, 3725 bp, Homo Sapiens
tctcgttgctatggtgatcgccggtgcaagctggatgcttggacgcgccgctgccagtccaacgcagaccccgcccacgacgtcgacgattcgtgtagcccgcaggtcccgcgtggctctcgttgctatggtgatcgccgccgctggctcaggcggaccaggccgcgcggagccccagctttcacagccatcgctggactgtggaagaatgaggtcctccctgacacctttggggccccctgtgagccgcgaccgtgtcatcgccagcttccctaagtggtacacgccggaagcctgtttgcagctcagggagcacttccacgggcaggtcagcgctgcctgccaacgcaggaacacggggactgtcgggctcaaactctccaaggtggtggtggttggcgatctctacgtggggaagaccagcctcatccacaggttttgcaagaatgtttttgatcgagactacaaggccaccattggggtggactttgaaattgagcgctttgagattgctgggattccctatagcctccagatctgggacacagctgggcaggagaagttcaagtgcatcgcatctgcctactaccggggtgcccaggtgatcatcacggcctttgacctcactgacgtgcagaccctggagcataccaggcagtggttggaggatgctctgagggagaacgaggcaggctcctgcttcatcttcctcgtgggaaccaagaaggaccttctgtcaggggccgcatgtgagcaggccgaagcagacgctgtgcacctggccagggagatgcaggccgagtactggtcagtgtcggccaagactggcgagaacgtgaaggcattcttcagccgcgtagccgccctggcattcgagcagtcggtgctgcaggacctggagaggcagagcagtgcccggctccaggtcggcaatggagacctaatccaaatggaagggagtccgcccgagacccaggagagcaagaggccctccagcctgggctgctgctaactggggcctgcgtggaaggcctccgctccctgcacacacacggacaggaatttccgtgactgtggtgtggagactggagcccaagctctgcagcgtgtcgccctcaagctgtaggcccatgttccagtccctccacccacccaccgggctcagctccagggcacagtcacttgtccgttgcaggttgggcactagaaaaggcccccactggctgcctgggagccccacaccaccgggccagtgcaggcactgtggtgatcccataaaaggccagtccatttgcagggtcatcagacagtcacctttggcctcaagaggcctcagaactgcaaactcctgcgtcggtctatactactcggccatggcccacatcagcagtcaaccctgcactctttcccagcgatcttggatgtgtccccaggatccgtcacagtgttccaggcaacctggacttgtcaaagtcagcacctgaaggagaggccacctgccattccccctgggagttttctgttgtcagcaggacttatggttctgggtctcagagcttcaggcctcactgtccttctgccacggatgctcaaggttcctgggcagaccagcacctctggaggacaatggacaaaatgtctcttagacctgttctggctgaagggctatctctggcacctctgagatccctaggtcctgccctcctggtccgtgggccaggatgtgcagaacaaccactcaggcctttctggcccacctggacagtgcatttacctgtgtgctgcgggaggcagactgcacagctgtcctagggtaactcactctgcagcccttgaacatggcactgccctcctctggcactcatgctgggcctgtgcccactgctgcctctccatccctctctcattggcctatacatctcttaggacctttgtaatggtgtccatgcacctttagaggacttcagaggccctgccaagtctagcatgttcctgtctccaacaccgcctcctgcacatgcagagcagacagaaataccccacacattccccagcctctctgcccagtatgctcatccacagggtttctactgctatgaaccagcccacagcccaggccctgtcacctggctatgccactcatcccacccgtctcgtgctgttgcttcccgtagatggcgagcaccttgcaggcagccttctgatcagtactgctctcctagggcctggcacactgcagctgccctgtaaatgttcagctcagcgattgccaaataccagttagggaagaacactggcatctttttctattcattcccccttcaacatattttttgtagttttttatataaatgactttttttttttttgagatggagtttcacccttgttgcccaggctggagtgcaatggcgtaatctcggctcagtgcaacctctgcctcccaggttgaagcgattctcctgcctcagcctcccaagtagctgggattacaggcatgcaccaccatgcctggctaattttgtatttttagtagagatggggtttctccatgttggtcaggctgctctcggactcctgatctcaggtgacctgcccacctcggcctcccgaagtgctgggattacaagggtgagccaccatgcccggccataaatgattttattcatttttatgttttcttttgggcggcgggatggagtctctgtcacccaggctggagtgcaatggcacgatcttggctcactgcaagcttccccttccgggttcatgccattctcctgcctcagcctcccgagtagctgggactacaggcacgtgtgaccatgccgggctaattttttatatttttagtagagagaggtttcaccatgttagccaggatggtctcgatgatctgacctcgtgatctgcccgcctcggcctcccaaagtgctgggattacaggcctgagccaccgcgtccggcctccataaatgacttttaaaggggttgtatgtttagtgtgaacaaagacagtacaaagcatatgaaatacaaggtgaaagccccccccccgccacattagctgcgcccctgaagtgtctccagcagaagagatggatgaatggaaggacacacagatggacagagagcaggaaagactgttagctctgctaacagtcaggactattccttctggactctgtgcctttgcctgcacagctagtgttgatggcttgtttgttgttttcaccagagtgagctccttctggacatactgcctggcagcctgccttcctagggagctggcgccaaggcctctccctgatggcacacaaggagcctccttcctgtagcagcgcccagttttcatgtggatggattgtagttcatttgaccctccccatccgcgggccatccggcttgtgtccagcttttagctcttgccaatggtgctgcagtggccattcttgtagttatagctttgcgtactcaggaaggcccttctcccgactgcggcccccagcctggtccactaaatgcagcctgtggtcgggcagacagcattccatggtggactgtcgttctccacagctcccttcccttgccccttcgggcctccaggatatgtttgcgggggtgggtgtggtgtccagctgttaccagcttctgagctagagctgtactgcctcacgtacacccccacctctgtaaatggtccttgattaaatcgtcctcatatt

SEQ ID NO: 59232 - DNA, 2037 bp, Homo Sapiens
attgtgtagctatacctagcaggaataaatactaagtctgtgtcagtattcttccccttggtttcagttatctattgctgtgtaaaaaaccatcccaactttgttgcttgaagcacccaggattcattgtttctcataagaattttctgctggtctcatgcggacttgctcgtgtcctagctgggatggctggattgttcatcttgcagttggtgctggacaatggtgggctctctctcagtggctttcatgcacaaggaggctcacacaggcttcttgatacagcagcctcagagcatcagaagggcaagagtggatgctgtctggtctttgaagtctcactcagaagtcacctgttgtcacttctgtgttctattagtgcaactgagtcctgaggcttgcccaggtttgcactgaggaaatcgattccacctcttgctgagaggagcagcaaagaatttatcgccacttttaacccactacaacctcaatttcaactgattgtctctaatgacttcttctgtaagcatccaaaacatcccttgattgaaactatctcaaggtgacctatcttccttcaacaatattttgtggttcgaaactatgtcattaagagagtgactttgaaaacctatataaggacccagatgtgaggtgactgcctagtctgaggaataatgactttaagttatatttgtagagaggtggtaaagccagcgaagcagacccatggagaaatgcaaatctgtcatcagccttgaaggatgggacaaatttggtggtgccctggttaaggaggaacagcactgtgtcttgctggcaaagcctaggagactaatttgtaaaattaacatttctttgagaatatgctttgttactagaaagcagtttgatcaatgtactcttgtataagcaactagattaaggaacaaaagagacaccttaaagaaacacagtgagccttcagaggaggagagccttcatatcactgtaattagcaaacgtctcttatgcatcagttgggctgccatgaggctgtaattaccaggtcttagagtttgcctctacctacatcattgtataaaatgaaaaccagatgaaacaatcaaatgttctatgcaggagaaaaatggatgcaaaacaaggcttgcaaaactcttaagtgctctatattgctaaaggttaactgcattgcctgacataaggaaaaaccaggaaactactctaaatgaggagtagcatcaagaaaccacaaaagaaagagctcgacataataaatacattattaaaatgcatagtatacagtgtaaaaggcagtctgcaatttttgaattatgtgtcctataaaagtacatcaggtaaatatgtgtaattggagtccctggtgctctggcaaagctcattttgctgaccttcagaaaactacactgacttttttaggagtattattttgatttgaaaaagctcttctttgccagtaaggaaaagtacagtatttacagaaaatgagacaaccacagtgtacttaaagtgtatgtagtgcatgcatgttctctgcaagaaaattaaaagtctctgtttttcattcagaagtaattagagaatgtcttttgtggctgctggaaaacagatgcaagactcctagaagtctgaagtgtaaaattaaagtagaatgtatcattgggtgtcctaatcttcaggtaatggcccaggcctgggaaaagtgaacagactttgtgttcccagttgtaaatgtgctccatggagtctatgatcatgctcactcaagatgtgacaaagcataaagagtcattttggtccagaaatccctgttggtacattaaactgggtgctgatattgactatgatacctggaaaaaaggcctcccatcatttcttaaagaagataacagttgtaccaggcacaacggttcactcctgtaatcccagcacttcagaaagccgaggcgggcggatcatttgagatcaggaggtcgagaccagcctggccgacacagtgaaaccccgtctttactt

SEQ ID NO: 59233 - DNA, 538 bp, Homo Sapiens
  misc_feature (428)..(428): n is a, c, g, or t
  misc_feature (449)..(449): n is a, c, g, or t
  misc_feature (462)..(462): n is a, c, g, or t
  misc_feature (468)..(468): n is a, c, g, or t
  misc_feature (474)..(474): n is a, c, g, or t
  misc_feature (494)..(494): n is a, c, g, or t
  misc_feature (520)..(520): n is a, c, g, or t
  misc_feature (534)..(534): n is a, c, g, or t
gatcgtaaactttattacttttctatttgttgtcctaatcatgtaatgcaggggttgagagttcctttactgttttgcaacttccttttttttttttttttttgaggcagagtctcactctgtcacccaggctggagcgtagtggctcgatctcggctcactgcaacctccgcctcttggattcaagcagttctcatacctcagcttcccaagtagctgggattacaggcatgtaccagtatgcctggctaatttttttttgtatttttagtagacacaggatctcaccatgtttgccaagctggttttgaactcctgacctcaagttatccacctgccttggcctcccaaagtgctgggattacaggcatgagccactacacttggcctttgaaacttacttttacaaaagataggtcatttctctnctgggaagaccagcgaacatnccctgggttgganggcctncagctntttcaaaattttgagcccanggaaaactggctaaagaaatggaagnctggtggggccccnaagg

SEQ ID NO: 59234 - DNA, 554 bp, Homo Sapiens
ctttctttccttctttccttcctttctttcctttctttctttctctttctctctttctgtctgctacaagtaaactttatttgatgtaatgtaatacaacattttcaagtttcacaatgagcgtttgacataaataatcatttaaattaggaatataagtatgcacggtcacttgagcaaatttgcagttcaggggttggtacgagctttgtctgaaagcttttttctcctttaggaaaaagtagcccttcccttcacctggtaagaagcactatcaatgggagttagaagaagtccataatccaccttggaattccagctgatctgtgagaggacagctttctgtattctagaaaaataatattctctttcagttcattcatttttccccatggaagatattggcactctcttcatctactggctttctgtctccttagctgctgcttattaccatagaaccatttttaaaaatataatatctgcaagagacctcttctggtcccttacctccctaaaggccaataatttggggaaagggaaggtggtgggaa

SEQ ID NO: 59235 - DNA, 2459 bp, Homo Sapiens
atgtggatgatacagtgtactacgatgttacaatggcacagtggctatgatgtcactaagcaataggaatgtttcagctccattacagtcttatggggccattgttaaatatgcagtccatcactgaaacgcatggctgcatgtggtagaaggtttcaattcataaatattaatttatactgctggtttatgactaacccaggaaactgcataatgattaacaaatgctacgatataaccaagtgaattgcaaagtcatctacacctgtattaaagttcagctcagaaaggactgtttggactgtgtgtatctagcactacgtagaagagaaagtcaagggcaaagttcccactctcaagaactttatcttgttgggttcatgaaagggtttctggtgacacagagtaggtatataatcagcaaaatgtggtctgcggttcaaatgagtgctcatgccagagattggttgggtgccagctatcagttcttccaccctgtccctggaagctatctgctacctctggggctggcacaacccagggtgtggctgcgactgcctagggtgtggccactgtgaactgagctgcatccccttcctggtgcacacccgcacacacaaaagtcactctctaaggagtgggaatatctatctcttcgccttggaatcttcagaaaataatgatgtagcaaatgatagtttttttgaatgttgatttaattaagctgattctttctttgaaagagaagatttaatgatttttcactccctattgcatttatgttttccacaactacgacaagagttttctctgtgttctgaattcttctttcttaagatttctctttctggattagtcataaaccagtctttcttaaatacattcagtttcttccctggtttcaatagatattgagggaagaaacggaaacctgaattggttagatgcatactttataccagacactgtgccagatgatagagattatttcaggtgtgtattcaggggacggggtgcgtggtggtggtcattctgaaagacacctgcagttgcagctcaaatcatttattccgtaagtatctatgagcgtgcacactgtgcttgacatggaagatgccagacaaacgtggtcctgctctgttttaagtgaaggttgttatggtgtataaagcaggacacctcacttggtaggagtgcaaggaggtatcagggagggctgttctgctgcccttctcgcaggcagcttttcaggcattgctcctgcacctatgcagacgtgtccatggctcgtgcgggggaccctcagggagaacagtcacgctgctgccccaggcacttgcactgtccctatgactgagtatgcatcctctgcaaaccactgctgtagcatcagactctgggtacccttactgtgaattcactgcctttccaaggtcctaactgttgctggctctgcttgtcatcatccagattcataacgccatacataccttaacaaagtgtgaggagagtaactttcactagggtgcaaatgcccatcaagtttaacctcacagattgcatttatactttaaaagaggagctcagtagtaaatattaatttgtaattatagattctaactgtggattgtagagcagttgctttgctgtgacaggcatctatgcaagaggcacttctcttatcttgccatctacctaccctagcctcttaaaattaagaaaaatagaagtcagtgactaagccaccaaatttgaatgtgttacctgggctagctggagtgttttgggggagaattctaaaacctgctctggtcttagctctgccctcatttactgagcctctatttccttttctataaagtggagctaataggagttttgtgaagagtaaaagtgagctgaaaagtgctgggctgacacaaggtagccctgcacatagccagggagcccagcatcctgtccaaagattagagtctgaaagctcactctactgatttgcaaactttaacctaaagcaaatatgcttaattttattgtccttacatttattgcttctgagagacaccttttttttttttaaggcaaggtcttgctctgttgccccatgctgcagtgaggtggtgcaatcatagctcactacagcctcagcctcctgggctcaggtgatcctcccacttcagcctcctgagtagacatgagagtctccctgtgtggcccaggctgcctggcctcaggagttcaagaatagcctggccaacatggcaaaacctcgtttctactaaaaatacaaaaattagctgggtgtggtggtgcgcatctgtaatcccagctacttgggaggctgaggcaggagaatcacttgaacccgggagatggaggttgcagtaagccgagatcgtgccactgcactccagcccgggcgacaagagtgaaactccatctcaaaaaaaaaaaaaaaa

SEQ ID NO: 59236 - DNA, 2862 bp, Homo Sapiens
cggagccctgcgagtaggcagcgttgggcccatgcaggacgcggagaacgtggcggtgcccgaggcggccgaggagcgcgccgagcccggccagcagcagccggccgccgagccgccgccagccgaggggctgctgcggcccgcggggcccggcgctccggaggccgcggggaccgaggcctccagtgaggaggtggggatcgcggaggccgggccggagcccgaggtgaggaccgagccggcggccgaggcagaggcggcctccggcccgtccgagtcgccctcgccgccggccgccgaggagctgcccgggtcgcatgctgagccccctgtcccggcacagggcgaggccccaggagagcaggctcgggacgagcgctccgacagccgggcccaggcggtgtccgaggacgcgggaggaaacgagggcagagcggccgaggccgaaccccgggcgctggagaatggcgacgcggacgagccctccttcagcgaccccgaggacttcgtggacgacgtgagcgaggaagaattactgggagatgtactcaaagatcggccccaggaagcagatggaatcgattcggtgattgtagtggacaatgtccctcaggtgggacccgaccgacttgagaaactcaaaaatgtcatccacaagatcttttccaagtttgggaaaatcacaaatgatttttatcctgaagaggatgggaagacaaaagggtatattttcctggagtacgcgtcccctgcccacgctgtggatgctgtgaagaacgccgacggctacaagcttgacaagcagcacacattccgggtcaacctctttacggattttgacaagtatatgacgatcagtgacgagtgggatattccagagaaacagcctttcaaagacctggggaacttacgttactggcttgaagaggcagaatgcagagatcagtacagtgtgatttttgagagtggagaccgcacttccatattctggaatgacgtaaaagaccctgtctcaattgaagaaagagcgagatggacagagacgtatgtgcgttggtctcctaagggcacctacctggctacctttcatcaaagaggcattgctctatgggggggagagaaattcaagcaaattcagagattcagccaccaaggggttcagcttattgacttctcaccttgtgaaaggtacctggtgacctttagccccctgatggacacgcaggatgaccctcaggccataatcatctgggacatccttacggggcacaagaagaggggttttcactgtgagagctcagcccattggcctatttttaagtggagccatgatggcaaattctttgccagaatgaccctggatacgcttagcatctatgaaactccttctatgggtcttttggacaagaagagtttgaagatctctgggataaaagacttttcttggtctcctggtggtaacataatcgccttctgggtgcctgaagacaaagatattccagccagggtaaccctgatgcagctccctaccaggcaagagatccgagtgaggaacctgttcaatgtggtggactgcaagctccattggcagaagaacggagactacttgtgtgtgaaagtagataggactccgaaaggcacccagggtgttgtcacaaattttgaaattttccgaatgagggagaaacaggtacctgtggatgtggtcgagatgaaagaaaccatcatagcctttgcctgggaaccaaatggaagtaagtttgctgtgctgcacggagaggctccgcggatatctgtgtctttctaccacgtcaaaaacaacgggaagattgaactcatcaagatgttcgacaagcagcaggcgaacaccatcttctggagcccccaaggacagttcgtggtgttggcgggcctgaggagtatgaacggtgccttagcgtttgtggacacttcggactgcacggtcatgaacatcgcagagcactacatggcttccgacgtcgaatgggatcctactgggcgctacgtcgtcacctctgtgtcctggtggagccataaggtggacaacgcgtactggctgtggactttccagggacgcctcctgcagaagaacaacaaggaccgcttctgccagctgctgtggcggccccggcctcccacactcctgagccaggaacagatcaagcaaattaaaaaggatctgaagaaatactctaagatctttgaacagaaggatcgtttgagtcagtccaaagcctcaaaggaattggtggagagaaggcgcaccatgatggaagatttccggaagtaccggaaaatggcccaggagctctatatggagcagaaaaacgagcgcctggagttgcgaggaggggtggacactgacgagctggacagcaacgtggacgactgggaagaggagaccattgagttcttcgtcactgaagaaatcattcccctcgggaatcaggagtgacctggagcactgtgcgcagccgtgtgtgctgtggagccgaggccgtcctgcaggaagccgcgtgactcccgcctcctccctgtgctctctggctctggactgtgactgcgcctggattctgccattgcgacacttagcgacgccactggcggcaccttctcctgcgcccagtgatgtttccacggtgcctgtacacagccgagcagcatttccgttgaaggacttgcatccccattgcgggcagtgctggacgtgtcccggagacccaccgggagggcgccgccatgccttgtacccccaccgtgcaggttgtggccggttttctccgcaggttgaacatggaaataaaagcaaacttgtatgaaaaaaaaaaaaaaaaaaaaaaa

SEQ ID NO: 59237 - DNA, 559 bp, Homo Sapiens
  misc_feature (361)..(361): n is a, c, g, or t
  misc_feature (510)..(510): n is a, c, g, or t
  misc_feature (518)..(518): n is a, c, g, or t
  misc_feature (539)..(539): n is a, c, g, or t
  misc_feature (550)..(550): n is a, c, g, or t
  misc_feature (559)..(559): n is a, c, g, or t
gcattttttttattgccaccagtgtagtcccaacctccatcctctctcacctggatcacagtaagcctctgcccctgccaatccattctccacaaagcagagtgatctctaggaaagcaactcaggttgtgtcccactcttaggtaaaaccctccaacagtttctcatgcctcagaatgaaatctaatctccttatcctggactctaacaaccccctcgatttagcccctacctgccctatctcttgcactctttccttgctcactcaatttcagccactggtgtccttccatgctttcattcattcatcctcaggcctttgagcatgttattccttctgctttacacagcctctctctgntctttgcctggttatctcctacttgtctggttctctgtgtgtcacttttcccacacaggtcttctctgacttcctaatactaaattaggatcataagtctcagtttcctcatttctgaaataaggtattctgcggattaaatgagaacnttcatgtnaaggttgttggccaagtactngcccacagtgnggaccttan

SEQ ID NO: 59238 - DNA, 1438 bp, Homo Sapiens
ggaaaaaaagttaaggatacagttgaccgttcgataatgtagcccactgttgaccagaagccctacccacaacataaacaggcaataacacatattttgtatgtgtattatatagtatattcttaacaataaagtaaactagagaaaagaacatgtaccaagaaaatcataaggaagagaaaacacatttacagtactgtactgtatttattggtaccatacatttatgttgctgtttacaagatgaagcatctgtctgaaatggccagcagctacagctgtacctatctactgtacatatcaagcaagtcgctttattcttataatgtctatgacttctttctttgaaagcgcttccatcatcactgttggcacttcatatgggtctcatggtgttaaggtttacggcattgcactagacacaatgaaaactacacaagagggccgggcacggtggctcacgcctgtaatcccagcactttgggaggccgaggcgggcggatcatgaggtcaggagattgagaccatcctggctaacacagtgaaaccctgtctctattaaaaataaaaaaattagccaggcatggtggcacgtgcctgtaatcccagctaatcgggaggctgaggcaggagaatcgctttttcccagaaggcgtaggttgcagtgagccgagatcgtgccactgcactccagcctggatgatagagggagactctgtcgcaaaaaaaaaaaaaagaaaaaagaaaattatatagaaataaaattccagctattccaaaactgcaccttgaatacaggtacagaattgctaaaaccgtgtaccattttgtagttttagcatgcttttgtgtaactgcatctggtgtttgatcctcatgagagccctgttaaggaagggtacatattattgtcctcattttccttcgaaaacacatcagagtttgtattttgactgtcagcattcaaatacaagtcttttatttataaaattttggtctttatactgtggctaaaaatcttaaatcacttgtcatgatttgaaatggtttataccgattttttttgacatttatacacacatacacatatttttaaattgtctataataaaatcatgctcatctttgaaaaaatattaggagtactacagtggatacctacatacttgctattcagcatacctggttttttgtttgttttttgagacagtcttctctgtgatccaggttggagtgcagtggcacgatctcagctcattgcaacctccgtctctactaaaaatacaaaaattagccgggcatggtggtgcgcgcctgtagtcccagctacacgggaggctgaggcaggagaatggcgtgaacccgggaggcagagcttgcagtgagccgagatcgcaccactgcactccagcctgggcgacagagcgaaactccgtctc

SEQ ID NO: 59239 - DNA, 4363 bp, Homo Sapiens; identical to SEQ ID NO: 28778

SEQ ID NO: 59240 - DNA, 1817 bp, Homo Sapiens
cattcgtgtcccctaaatctataaataataatataataaacaaaatacaagccctgaattggaaatgggagatggataccaaggcttgagtcctcagaacttagcttttcttggcctttacctctggagcaagagcccagctggtgcttttctttgctgttgcttctcagttccctctcctcaccctgggtggggtctctctcaggggtgttcattgcccgtataccttagtacttggcctagtgatcaaagcaccagtcctgggttccatgtctcatcaccagatggggctggtgaccgccccacatggtgctgtgagagttaaatggggagtatgtgtagtgcacttagcatagtagattgcaccagacatatcttccaacagtagctattgttattcactagtggagagtagaatgaggccctggggagggtgagagcagttctctaagaagtgtggaagtctaaaccgcagatgtggccaggaggaccctcccaatccacacactggcctccctgccccttcctgtatcagtgccaactttgtcctgtgcatcaaaaccctgactccatttcatgggttgctactgctcatttggctgcgggaaggccccgcttctgaaaataaaattgcctgtcagagaaaccctaaggatcaggattccggatctgggcagggcatggacaagttgggtggcagtggcaaaagcccctccccatggtctgccttttcccccagaagcaagttgctgggactgttgcataaaatggctcccacctccagtgcccagacagcctgcgctggggtgaagctggctacacgtgcactgaagctggcaggcttggggagaggtgagctgaggccaggtatctgcttcctttgcccaggattttgatggtctctcccctacacccacagtgggtgtgaacaacaaagacccaatctttgatggtggtgaggattcctctgcacacgctcacactcacgttctctacccccttcttttcaacgtggcccacagcacgattccagaccctgctctattgtgctcagaggaagcagctgctggctccagcccgaatttgggagtgctttgatatgcagccctctctggggccctgccagtactgactctagatgagccctctgcggctgctgggctcacaaatcagccttctcaccccttcctccaggagcagtgttggatgagaatctcccccttacacacatagatcctgtgtttgttttgtctgcttttgtttgtttgtttgtttttgttttcctgttctgttcaattttataaggaggcatagcttttggacttggttgcagggttgggtttggaacttaataataccttggattgacaaaggcgccttttcttctaaagaacacaaaccttgatggttcttgcctgggtgtggttctcacctgggtgagcctggctgtgagggtagggggcctgaggtcaccccaaccacagcttctgtggtcctactggcagcatgttctagacagacctgtgtggagctggggaaaggagagtggagaagtttgaggaagctgcatgtttatgttttgtgttcctccctcccccaggttggggtcagcgggactttatttggatccaccacaggtcttttcaaccaaagccttgcagaaacaggctttaccccatacacacagaagagcaacgacttccttgttaagagtctgaaaatctgggtgagagcctgtcagacccatggcctcagagagcaggaaaaatcctttgcaactgggaaggaaattcagaagacaaaaaaaaaaaaaaaaa

SEQ ID NO: 59241 - DNA, 1941 bp, Homo Sapiens
gtatttgtgttagatgttgttagatgtgttgtttttttgtgtgtgttttgtttcgttttctgagacagggtcttgctctgtcacccaggctggagtagtggcgcgatctcggctcactgtaacctccacctcccaggttcgagcaattctcctgcatcagtctcctgagtagctggcgttataggcacctgccaccacgccaggctaatttttgtattcttagcaaagacagggtttcaccatgttggccaggctggtctcgatctcctgactcaggtgatctgcccgccttcgactcacaaagtgctgggattacaggtgtgagccaccacacctggccagcctgtgagagctttaaaccatgagatagacatatggttttgcaaaagtttctacataaatcagaatggttcccagaacagaaaggctcctctgtcactttttttatctggttgcttaaccataagatgccaacccaattaacagtcacacccatatttgcattatatctgtttcatatgttccgtgtaactgcctcctttcaaagtgttggtatatttttcaagtcaactggaaccaaaagtatagagaaactgaatgcaagccagctttctgcatatgtaacagtgtaagaatccaggttgtatagatgggtttttgtttgacacagatgtttctcccagtaaagagaggataaggagctggaactcgtggcacagttccctacaaaataattaattgatcatgtctactaattaaaatttctttttctgtactattgcagatacctggttttggctgggcaaggtggctcacacctataatcccaacattttgggaggctcacttgaggtgggaggctcacttgagcccaggagtttcagagcaacccgggcaacaaagtgagatcccatccgtacaaaaaattaaaaaattagctgggcatggtggcacatacctctagtccagctattctggaagcttaggtagaaggatcacttgagcctgagagatcaaggccgcagtatgctgtaattgcaccactgcactccaccctgggtgacagagcaaaaccctgtctcaaaaaaaaaaaaaaagagacacctggctttactgtgtatgctgtacctcagggcaagttttccctttgtcttctaatagacactttttggatccagaaattgttctctgcaatttctttacttaaacataattatcagcctgtatgacctctgtggtctgactactttgaaattaagggagaaggctgggcacggtggctcactcctgtaatcccagcactttgggaggctgaggtgggcggatcacttgagcccaagagttcgaggcaacatgacaagaccctgtctcgacaaaaaaacaaaaaacttagccagacatggtgacacacgtttatggtcccagctactcaagaggctgaggcagggggattgcttgagcccaggaggggctcaaggtcggcccaggaggtcaagacccaggcgatcaaggcccaggaggtcaagactgcagtgagctgtgctcacgccccactgcactccagcccagtcatcagagcaaaaccttgtctcaaaaaaaagtaaagaaagacatgtttattatatggtagtttgaaaaattacaaaaaaaagagtaaatcatggccggacgcggtggctcacgcctgtaatctcagcactttgggaggccgaggcgggtggatcatgaggtcaggagatcaaggccatcctggctaacacgatgaaaccccgtctctactaaaaatacaaaaaaattagctgggtgtggtgctgggcctgtagcccagctactcgggaggctgaggcaggagaatggcatgaacctgggaggtggagcttgcagtgagctgacatcgtgccactgcactccagcctgggtgacagagcaagactccgtctc

SEQ ID NO: 59242 - DNA, 3541 bp, Homo Sapiens
gacagagtctggctctgtcacccaggctggatttcggtggcacgatctcggctcacygcaagctccgcctcccgggttcacgccattctcctgcctcagcctctacgagtggctgggactacaggcgcccgccactacgccccgctaattttttgtatttttggtaaagaggggtttcatcgtggtctaaatcgcctgacctcgtgatccacccacctcggcctcccaaagtgctgggattacaagcgttagccaccgcacctggcctctggacagtgtttttcacaggtcagattaatttttatataaatcatttattttatttttattatgtaaaattttataatttttaattttatttttaatttcctttttaaaagttaaataaaattttaagtgtaatgatgcaaaattttgtttaaaagtaaatgtatataaaaatgttgatatagactaaaaaattgaataagtaagaaggtagttagttgtcacagtaggagtgaagtgaaaagcttcccctttcaccctctgaagattaccggaaatgaactgaccatacacagattaataaaagaaagggtatacaaacttacataacctgcaaaaacatgagagctatacacaaagtataagacttgaagatggctcagatcttaaacgctctcctcataggcaatagatatatagacccaggatgcagacattattttgtaaataatttcctttggaagctggatgggacagacaaattacaggaaggtgagagatggaactgcacaggaaaaaagtttgtctttgtcactttaatcttatcattactagagaatatttatgaatattttagaataatatatttttaagcccaaatctcaccaaatgttttttctaaaacaaatacttttggttgttgtttgttttggttactgtgtctcactctgtcacccaggtatggagtgcagtggtgcaaccatggctcactgcagccttcacttcgtgggctcaagtgattctcctacctcagccttccaagtagctgggctacaggcatgcaccctcatgccctggtaattaaagaaaaaaatttcgttagagaccaagtctcattatgtcaccctggctagtcttgaactcctggaatcaactgatcctcatgccttggcttcccaaattattgggattataggtgtgagccacagtgactgaccacatatttctatacttcactgaggaaaggaaggtgctaggaaaattggttaagaactattttttaaaaagctattagtagtgttttattttattttttaatgattgattgatttttgagattgggatctcactacgttgcccaggctggtttcacattcccaagtttaagcaatacccctgcctcagtctcccaagtagctgggatgacaggtgtgtgtcaccatacccagctccattagtagcgtttttaacaattgtgggccactgagtaagaataattttttttaaattaaaggttattttttaaaaagcacatttgtagaaaattactagcataatctgcctaaaataaatatacatattgaaaaaatctttgctctgaacaaaaagaagtatattcaccacacatacatacatacacacacacacacgcacacacgcacacacgcacacacacacacacattatggaagatttcaagaccaggcaataatttccactcaatccaaaaacaatgcaatcccagagctgaatatttaggtgaaaaatatatcaggaatgggaggcattcaggtttaattttcatgttttggtagagttaggatgtgagttttcatttaaaaatattctttattttttttttactattgtggtttctgtattgttactatacaatctgtaaactaaatagtaaaggagagaaaagtgattttcaaagaagctggcttgggaacaggcactattctgggaagatgaaaggtttcacttaatgactggtacctgtgccactctggttattttaactgttaaccttttagcaagaggtttttcttttaaaagacatcctttaatatttgggaagctagtgcaatagtacacattgaggcccacataccacatgccaaatatttaaaaggcatatttctagctaaccactgtacatacatatattttttctcttattttcttattttagtttttttccttgacaacaatttatgtccacacatatcttctatcatcccactttgacaagtaatattataccttcaaaatgatgtggaagactagattggaatttagaaccgtagaaccttgtaattgtacaggcaagtttcttcctgggaaaaaataaaacaggaagaaaaggctgggcagcctctggttcaggaaggaaattcaggagtcccttatagcagcatctctagtacttgggaaccgaacagacttctcggcctgtgaggctggaatgggcccttctggagaacacgacagagaagttatctactgyctttgcccccagggcccaggcracacttttaccctccattgtttctgaagttaaggggaggagacaatgttttgtttagtgacctcgacagaaaaagtgtcctcctgcaaccactcatttgttactttccttcttcctgaattgcctggacccactcctcctccatttgactggctctgtgcactgatgttatagtcaggagatttttgggaattgtggcttctaaaaatgtacacccgactctacccatagctggccctgtgaacctacacacctgctccactgtgtctccttctcaaagagacactcttcctgctgaggctctgccctctgctcctagatccaaatggcatctcctaccctatccctgtatggcttaacctagggaaactctttcccagaggagtcaggtaaggagacggtggctgagcttcttacagacttaaaggagacatcctggaatttaggagtccgtccttcctttctgtaatccctggcagctcctgctgctgctcaaagtttagctttgtctctcatccagctcagactgttgctggtcctgatggcctctgcttagctgtattagtacgttcttgcattgctataaagaaatacatgagaaatacctttagttggctcatggttccataggctatacaggaagcatggtggtttctgcttgctggggagkcctcaggaaacttttactcaaggtgcagggcaaaaaaaaacaaaaaacaacaaaaaaaaaaagctaccagcactgcactgtgaggccctgatacctgagctaacttcatattattacctctacagcaagtgtccgtgagaacatagatatatttcttatgtgagtacacaatttacagaagaggaactacccttccaaaccaaaacaaaawgtcaaaaattagcttggtgtagtggtgtgcacctgcggtcctagctactcgggaggctgagggaggaggatcgattaagcccaggaacttgaggttgaagtgagctctgattgtgccactgcactcagccaaggtgacaaaa

SEQ ID NO: 59243 - DNA, 1701 bp, Homo Sapiens
aagatacaaaaaaaaattatccaggcatggtggcgcatgccggtagtccaggctacctggcagggcactgagataggaaaatcacttgaacccgggaggctgcagtgagccgagatcacgccacggcactccagcctaggtgagagcgagactctgtctaaaaaaaaaaaaaagcactcagaacagttcttggcacacagtacctgctgaataaaaggtggctgttattattgaaggggatatcacatatcaaggttaatggccctgtcctcaaggagcttatatttgtgcagatccatgcagatgaaccaagccagaagcaataaatgagcaaacaaatgtgatgcaaagtcagtaaggacaaaagtactgaaagaacacagcataatcatcctaaaaattaacaaccataatcaccgcaagccaataaacagatccaaaaatgttccactcagtcatttttttttttaggcaggtaccttggtccttagacaaaagtgagttagaatttgactctgactcccagaggggagacgcttatatcatttggcttcatagaggtgaattaccagacaagcaaagaactcagtgtattccaccactgacctgcctttgggaatgggtggctctgcagggcttcatcaagatgaagagctaccccagcagcaccaatgtggagaccgtcaacgatggtgctgagtcggccatgttcaagcagctgttccagaagtggtcagtaaaggaccagaccatgggcctggggaaaacgttcagcattggtaaaattggtgagactgcccccagatcatcctctcattgctaagactctagaaaagcaggcacagatgcttcttactcactcggcttttcccaaccctttctccacagctaaagttttccaggataaatttgatgtgactctgctacacaccaagccagaggtagctgcccaggaaagaatggtcgatgatggcaacggaaaagttgagatctggactctgcttttcttctctctagggtgggacttccaggaagggaaatgccgagcctgaccctccagtaagactcttccaaattcatggaaatgacaaatctaacaccaaagcagtggaagttccagcctttgcctcctccctaaactccaatgatgtctttctgctgcgaactcaggcagagcactacctgtggtatggcaaggtaggatggctgggccccgggtcagaccagcccctcggagcccagacctgcactcccctcctcctgtcagcaaggtcaaaggacctagagtaggctggagtgcttgctttggcagcacatatactaaaactggaatgatacagagaagattagcatggtccctgtgcaaggatggcatgcaaattcatgaagcgtttgatattaaaaaaaaaaaaaaaaaaaaaaagctgggcacggtggctcatccctgtaatcctagcactttgggaggctgaggcaggcaaatcacgaggtcaggagttcgagaccagcctggccaacatggtgaaaccccatctctactgaaaatacaaaaattagctgggcatggtggcacgcgcccatagtcccagctactcaggaggctgaggcagaagaatctcttgaaccagggggcggaggttgcagtgagccgagattgtaccactgtactccagcctgggcgacagggtgagactccgtctc

SEQ ID NO: 59244 - DNA, 565 bp, Homo Sapiens
  misc_feature (456)..(456): n is a, c, g, or t
  misc_feature (536)..(536): n is a, c, g, or t
  misc_feature (549)..(549): n is a, c, g, or t
  misc_feature (551)..(551): n is a, c, g, or t
  misc_feature (556)..(556): n is a, c, g, or t
  misc_feature (558)..(558): n is a, c, g, or t
  misc_feature (565)..(565): n is a, c, g, or t
aaagcagtggtattctctggctggtggcagaagcgtatgtcagagagatcagaaaggtaaggaggagtcaacatgagagagagttgctcacttgagatggaggcgggcatgtggtctgagaatgtgccctggccaacagccagcaagaaaacagggacctcagtcctacagccaaaaggaagtgcattctgctaacgacatgacagagcctggaagtgggtttttgccagagcctccagaaagaaatacacaggggctgacaccctgattccagccttgtgctgtttgctatctgtttcctatctgatactctttaccaggcaggcttgctgggtttctcaacctacagctagtaaacaagtgttgtttcatgctgctaagctagtggtagtctattacagagcaatcccaaaccatccccaccccacaaactggccaagtaagagatcttcttgngacttaataaacataccttaatatatgcttatcctgattaacataaattccatatatatatatatatgaatgacagcttntaaaagaagtccncnttctntntcaaggn

SEQ ID NO: 59245 - DNA, 580 bp, Homo Sapiens
atggtggtcatggcgccccgaaccctcttcctgctgctctcgggggccctgaccctgaccgagacctgggcgggctcccactccatgaggtatttcagcgccgccgtgtcccggcccggccgcggggagccccgcttcatcgccatgggctacgtggacgacacgcagttcgtgcggttcgacagcgactcggcgtgtccgaggatggagccgcgggcgccgtgggtggagcaggaggggccggagtattgggaagaggagacacggaacaccaaggcccacgcacagactgacagaatgaacctgcagaccctgcgcggctactacaaccagagcgaggccaagcagtcttccctgcccaccatccccatcatgggtatcgttgctggcctggttgtccttgcagctgtagtcactggagctgcggtcgctgctgtgctgtggagaaagaagagctcagattgaaaaggagggagctactctcaggctgcaatgtgaaacagctgccctgtgtgggactgagtggcaagtccctttgtgacttcaagaaccctgacttctctttgtgcagagaccagcc

SEQ ID NO: 59246 - DNA, 411 bp, Homo Sapiens
taaaggaattcattagccatggatgtattcatgaaaggactttcaaaggccaaggagggagttgtggctgctgctgagaaaaccaaacagggtgtggcagaagcagcaggaaagacaaaagagggtgttctctatgtagtggctgagaagaccaaagagcaagtgacaaatgttggaggagcagtggtgacgggtgtgacagcagtagcccagaagacagtggagggagcagggagcattgcagcagccactggctttgtcaaaaaggaccagttgggcaagaatgaagaaggagccccacaggaaggaattctggaagatatgcctgtggatcctgacaatgaggcttatgaaatgccttctgaggaagggtatcaagactacgaacctgaagcctaagaaatatctttg

SEQ ID NO: 59247 - DNA, 4457 bp, Homo Sapiens
cagcaccaggctgtggcaggttgggttttgctctgtgctgtgatttctgttggagttggaaagttggctgtgagtcggcccagatgtgaagcggaaacggggaggagggaggtgagtgggcctggctgggtggatggggatctgctcgcctgcacggtttcctctttggtaaagtggggcctgcactcgccccatctagacaggcatgtggggactgaggtgattgattcccagcgtggaggagcatctcgctcagtgccaggcggaccatggcctggaggtggccggcattttcccttctcctgaggggatttattgatcttgtgctgcaggtggtgtggcctgagggcaggtgtggcttgcagagctcatcactggggcaggtgcagggctctggggtgctgagctgtcactggcgaagggcctcaggtcccccccaacagctcccacctgctcagccacagcgtggatgcgtcccgggctccccggccccgggggataccataagcacagaggtggcctctttaatcaggggcttcccagggagggtctgaggctgggctgcgggattactccttccttgggaagcaggcaggggtggccaggcacagtggctcacgccagtgatctcagccccttgagaggctaaggcggatggatcgcttgagtccaggagttcaagaccagcctaggcaacatagtgagctcccgtctctacaaaaaatacaacaacaacaaccaaaaattaactggtggtgaaaaaattataaaaaattatggcagtgagtgcccgtggtcccagctactcaggaggctgaggcaggaggatcccttgagctaggaggtcgaggctgaagtgtgagccatgatcctgccactgcactctagcctgagcagcagagcgagaacctgtctctaaaaatggaagagaagcaagcggggggacctgtgtggtgaccctggggttgtgccccgccgagcaaaaccaagatgggtcagcagtccctggacttggagcatccacgtggctctgctaggcagtggaggggccccgtggtggagcagcgctggcccgggaagcgtgtgtcactaggcttgtgatcagacggctgcctgcatccctgagagttgctgaatttagggagttgtggggcagaaagagcggtggcttcacccacagagtccagggttcgagacccggccgatccacccacagagtccagggttcgagccccagccgatccacccactagctctgtggcgtgagacactgctgtagaatcagtcataatcatctgagccacgatctcacccagggcgatctaatcttaacccaaagggacactgggtgatgtctgggcacatctgtggttgtcataacttgggggagctcctggcagggaggggcggcggccagggatgccgctcagcaccttgcagtgcccctgacggccccaccccagagaacgatccaaccccgatgtccacagagccaggggttagaggcctggttttctgggccctggttttctcatctgtaaagtggagacagggtttttgtcccaggcagatgaaaagttcaagttcctagttgggtgttaaccctggtggcaggaagtgacgatggtggctaagggccccaggatgggctggggaagttcaggcctttctggtcactgcagcgtgggtgggactcaagtcctcctgccacctgtgcccaggctgccctgagcagtgtcccccagccggtcctcaccaggggctcccttgtgacaaaccattgaccctggaccttcttatggtgcagactctgtcgtcactgcgttcacagtgggcaccgtgttgtgttgtgttgtgtttttgagacggagtcttgctctctcacccaggctggagtacagaggcccgaccttggctcactgcaacctctgcctcccaggttcaagcgattctcctgcctcagcctcccaagtagccggaatttcaggcatgcaccatcacgcctgtaatcccaacactttgggaggccaaggtgggcggatcacgaggtcaggagatcgataccatcctgactaacacggtgaaaccccgtctctactaaaaattcaaaaattagctgagcacggttgcaggcagctgtaatcccagctactcgggaggctgaggcaggagaatggcgtgaacccagtaggcggaggttgcagtgagacgagatcgcgccactgcactccagcctgggcaacagagcgagactccgtcttaaaaaaaaaaataacgtatttgtatcattgctatgtttaatgtcgtatttcattgaccataagtcccacagggaaggaggaagttgttacttcctgtgtggggctggggccagggtctccccctgggtattgagtcattctctggggtggagtgtcctgggcactgcagggtgctgagtagcgttcctggcctccacccactccatgccaggagttcccccaaaacctgacaaccacagatgtccccagacatcgtccggtgttgaggggcagaatcttcaccgtgttcaggcctgtgggggcagggggcagggtggtctatccctgactcagcccgccaacatcctctgggccacgaggcaaatgagaagaaaaaggaagtggtcgggggtgtgagccactccaagcacagacaattcccaccggggacaaagggatgggctgagctgggacacctgggtggggagtcgcaccctacgtgccctggagaaccaaggcagcctgagtcaccatgccagctctgccgggctgcagatgctggtttcagaagcgcctggcagctgcggagctctggggatgcggacttggctgggctaagatggatcgggtatcggggcccccagaatcccctcagtggagtccctggtagattagatcagaggggaagctgccaatctagctgaggtcttgccccagggcagttttgcccccaggggacttggaaatacggggcagtgcggggggtgcatttgtgtttgtcacaactagaggaggggctgcccctggcatggagtgggtggaggccagggacattgctcagcacctgcagtgcccaggacaaactcacccagagaaggatccagccctgaatgccaagtgggggactgcatttgttatttgggaaaaaaaaatcaagtctgctccctgctcacaccagacaccagaataaactcccaatatggcagacggtgtaaaccaggggacctcagctcctgggattctcttcctctccccctctgtggatttcaatgtgtgtagcctcctgggacctcagcagagcagaggatcatgggccacggagtctcttgggggtccgtggaatcccctaacccaagaggtgtcaattgagggtaattctgcccccaggggacactgggccaagtctgggacatttgtgtttttctcatgactgggggtgctcctggcatggagtgggtggaggccagggacgctgctcagcaccctgcagtgcccaggatggcccctccccagagagtgacccacgccgatgtccacagtgcagagagtggaaacgctgccctagtggcagacgcagcagattcagaattgaaggatctgagttcaagcccagacttgtaccttttacctcccaccctcaggcgaggcaactggcctcagcttctggacgtgcagcacgggtgagcccctcccgccagccaggaaatgatgagtttcacgagagcaggtcctccagggccccagcaaatgccaggcctgtttactaatgacagcaaaggtccaccatcacttagcaggaatgagagcattcgctttcagcccgccctgccagcctcacagggctgcggcatgaacccctgtagggttagtttatgagtgcgtagggaagtgctccccagaaagcaggagaaacacggatggccagatacacgtttgagcctctgacaactacagtcactgtgtactaactagtggtgaggttggcaatttgtaaaatttactcattaaagagggagacagagccaggctccgtgcctcatgtctataatcccagcactttgggaggccaaggtgggaggactgctcgaggtcaggagtttaagaccagcccggacaacatagcaagacccccgtctctacaaaaaatacaaaaattgccgggtgtggtggctcatgcctgtaatcccagcactttgggaggtcgaggcgggcggatcatgaggtcaggagttggagaccagcctggccaatatggtgaaaccctgtctctactaaaaatacaaaaaaaattagctgggtgtggtggtgcgcacctgtagtcccagctactcaggaggctgaggcagaagaatccttgaacccgtgaggcggaggttgcagtgagccaagatcgcaccactgcactccaacctgggcaacacagcgggaccccatctc

SEQ ID NO: 59248 - DNA, 1483 bp, Homo Sapiens
aaaaaaaaaataaggcggggaactggggcgggggtgcgttgcgggaagaaaagagaaagaagtgaactggagctttcggacacagaaggacaggaagcttgagagaaaaggagaggataatgagtgaaatgcaatgcagcacctccttggaacacacagttacaattcagttcacagggcacactggctcaccgtatttttaactagtttctctccccacctcctttttaaaaattccctttttgcctctgtttccaaagaaatgccagctcaaaaccaaggcagttggaatttaacagctctaggaagctctagtgagaataaaagccaaataatatgaaccagccaaaattccttttgcaacatttttccccaaaagaaaaatacagaagatatttcttttcaagtctctaattctacctttaaaaaatatgtgtactaatgaacagtattcattttaaatctagaacctgggaatatattactataggcaagacacctttaggtaaagagctcataattttccattgaatacagtaaaattataaagaatgtaacaaaggctttggtaatttggtagaggggctttttgatgaaaaaaagacagatgatttagaaagcgaggaacacatcaagcctcagggaaagaaaatgtttgattggtattaattaaaacactgctaatatattctaataaaatcaaatttaacattctaaagtaatcctcttggtatgtcaaaggaaaagaaaagtattatcttatttgcatctctgcaatccaaatgcatttgctcattcagcagaattaatttttatcaccagcctgttttatctcctcacagatttagtcaaagttattctttcaaactagaaaggatcagggtggggaatccatggaaggtattggaagactagtgactgtatttagtaccggctttatattttacgatgttctttctcttcattcgctgtaatggggtgtggagggaaacggtgagaccgcagtgagaatgatgaacggttcatttttcctctttctctccttgtacctgccagattatttaagaatttcagctgccaaattatacgaatgccatttatttacgtgactggtgttggtctgttgattaatgtctaatgtttttctaatttcagactttaatttaccgaaaattcctaatgaaaaaggctcttaagccagaaaccaattgcctcttatcggttatccccaactgtagatcttctatgagaaagtggggaagtgaatgtaaaattttattcactacaaactgagttctttgttcctttattaagtcaaaatttctccaggaaaatttcatatttttatgaaacagcaagttttatgttctttattgttaaactctcacaactgataaaattatcccgaaatgacataaccaaaatgcttctcctctcattagtctaccatgactatgatatcttatgtaaatatgtgactaac

SEQ ID NO: 59249 - DNA, 565 bp, Homo Sapiens
  misc_feature (159)..(159): n is a, c, g, or t
  misc_feature (187)..(187): n is a, c, g, or t
  misc_feature (485)..(485): n is a, c, g, or t
  misc_feature (539)..(539): n is a, c, g, or t
  misc_feature (549)..(549): n is a, c, g, or t
  misc_feature (560)..(560): n is a, c, g, or t
cctgtttggtgccctagaggtttttacatcttggatcaatgcataatgggaaatacataacagcaaaaggtaacaagtaagagactttggaaaagacaatgcaaaaaacataaacaagatctccgaagactagaaacagattcccttaaagctctctgngcctttatatatcctgaaaaatcttagngtatagcttgggataggtataccccagttttggaaactactgtagaataaatggttttctaaaatttataatggatttaactcatgttaattttaaatgtctatatagttcacttactagtatttctccccataagaaaaacaccaaccacaccaatataaaatgtgagaaagaatctgatatgctgctttaaaaaaatcttcataaatattccataattttccattttggtaaattataatcttttcaacagacttattacccagtaaccaaactttttactaggatccccaaaagngcccccaattttcctaaggattaatcatttcccattggtatgacctgaaggttngggtcccttnaaaggcttttntggaa

SEQ ID NO: 59250 - DNA, 1761 bp, Homo Sapiens
gtttaatcactctgtgcctcaagttctttatttgtaaatcaagataataatagtagttacaaagtaaaggctaaagttaataaagacccaaaagaaaattaaaactctacatattatgatattataattaccaccatcatcatcgtcctcctcgtcaccattattgttttgttgttggtagcagtggtgtcctgctaggtgttagaagctaggaacctatagaaaaagtgctcttccctgtacaggactatacctggccttacttgaaaactaagaactcttagcaacattagcaacatacttctcagctctagaacttcccgatgaagtggaatgttttgcatcggactttttgcaagaagatcaagcttgaacccggtaacctgtttttccatcgagcacttgattctacattaagatcaggccatagctctgcaaggtgggggcccggactgaagggtcaggctgggtttctgtttcgtaactgggaaaggcatgtactgcatgcggcaggctgacctcctgaatcttcaggacaatctcaatttcagatggcccaccctgctgatcaaacctgtggtttggaaagcatggttactgctaaataggaagcaagggctccaaatgccagtgtcctaatcgtttaaaaagtaaatataatttgaatatgtgggatagcctcagagaaaaatcaaagaacacaattaagcatagtttctatttagttttcagttgatgaaggaataatttgaagttgctctagtcactgagagtacagtagcaatagtcctccattctctgggattcagggcaagagcggacattatgtgcatattacaggttttctagcacacagattctatcaagatagcctctaactgcaattgtggacactggtggaatattcctagcaggagctcaaaggattgtaaagctgaataacatctttgtctcaagaacttatatgagaaacttttttccctttttctcctacaagcatttagtggttcaccattgcagacactgcatatctttgtatcccacacagtccccatgttaatagttgtttgctagttgtggtcatttaattgaaaaaagctggcacagagatattacaggtcccaataggtcatttctgtatcaagtatggtgttattgcctttaaccaagccctgtccaaggccaaatttattacatgcattaataacatataagaggatagacagagagctgaagaaaagatgtgtgtggcctttaaatatgccaatcatctacagttcggagggttgcttaccgtgacatattgccagctgtgcattatagaattccagatggcatggtactgttggtacttgttttggatttgccctgggaatgaggttaaagaggacaccaaactatggctgggatccttttgcttgcctcttccagggtagatcctggaaggctctatctcctccaaccaatcagaaagctgccctgacctctcttggggattatgaactcagcacaaattgctctttccccgtgaattcccatgcacctagtaaccctgcactaagagagcagtgagtgcattccctcatgtaatctgtgttcgccctccctcagaccccagagctggggcaagtttggacatgaactcaaaaactctatagataagggttgtgttttcattagcttgcctgtcttgcttgctttatattctgtgagatttccttcccccatcccccctttttttgaaaaaaaaaaaaaaaaaaa

SEQ ID NO: 59251 - DNA, 1584 bp, Homo Sapiens
ccagctcggagcaggcctcagactgtaacatgatgtttcaggtttacggtgtgagactttgtcagtgtgaaccttgagcagtttggactcaaattgtagcctcatccactgaggcatgtttgtaattagggtctggcttactcagggctttctctggaagttaacaagaactacagagtcagaaaattctgccaggagaaaagtgatgtttaaaaaatcatctaggatggccgggtgtggtggctcatgcttgtaatcccagcactttgggaggctgaggtgggaggatcacattagcccaagagtttgaggctgcagtgagccatgatcacaccactgcactccagcttgggtgacagagtgagaccctgtctcttaaataattaaaatttaaaaattaaaaaaaaaattccctatgagagaaagtacatggactttggggaaggatctgaagtttagccaggttgggacaatttggaccgaatcatttaacttaaccctgctattttcctcaactgtgcttagaaaaggggtacaggacctgatttctgtccttaagaggtttatagtccagctacaccttagcctgggggcagagtttctcaaccttagcactattgacaacttaggcaggataattcttacagtggggggtgtcctgtgtgttgtagcattggcagcaccgttggtctctacccagtagatgccagttgcccctccccagttttaacaggcaaaactgtttccagacactgccaactctgtgcaggcaggaggggcaagttttcccctgatggaaaaccactgccccagggtttctgcggcccagaactcattgttttcactgatgtcataggagtctggagttttatatcacatgccctggtcttcattgttttatggcatgaacatttcagtgtgatgatggttatccctgaaacagtaaggctgaagttactgaggcagaacaaaccaacccaagagagaccttgttccccatcttcctttagaattcaagtatagattcttttttatatgattgggtaagaccaagagacgtagcgtgagagagaactgtgcacccttaggagtgtacaaatcctttatcaggggtgcagatgcctctgaagtagcaacttcttcaggatcccccctttattctttttctctctcccttttgtatgagtttttctctcttgtatgttatgtttcttgttgcctttagttaaaacgtccactctttatggaaaagtgaaagtcatgtcaggcacttttttccattcttaaaaagtgcctcttccattggctgggtgtggctcatgcctgtaatcccagcattttgggaggccaaggcaggtggatcacctgaggttgggagttcgagaccagcctggccaacatggtgaaaccccctctctacttaaaaaaaaaaaaatcagccaggcatggtggtgcatgccagtagtcccatctactgtggaggctgaggcaggagaatcacttgaacccagaaggcggaggttgcagtgagccaagattgcaccagtgcactccagcctgggcgacagagtgatactccatctg

SEQ ID NO: 59252 - DNA, 635 bp, Homo Sapiens
acttcagccctagcagcatctgcctgtgggaagcagctctccacaccagccaagggggcccccacactcccgcgctgctctgcggctcagggagcagcccacctgctggatgaggaacttgaggcaagtcaccagcccctgatcatttcgcctaaaagagcaaggactagagttcctgacctccaggccagtccctgatccctgacctaatgttatcgcggaatgatgatatatgtatctacgggggcctggggctgggcgggctcctgcttctggcagtggtccttctgtccgcctgcctgtgttggctgcatcgaagagcaccttctgtcctggtcccaggcccagggctcctcagagcaggaactccactatgcatctctgcagaggctgccagtgcccagcagtgagggacctgacctcaggggcagagacaagagaggcaccaaggaggatccaagagctgactatgcctgcattgctgagaacaaacccacctgagcaccccagacaccttcctcaacccaggcgggtggacagggtccccctgtggtccagccagtaaaaaccatggtccccccacttctgtgtctcagtcctctcagtccatctcgagcctccgttcaaattgatca

SEQ ID NO: 59253 - DNA, 574 bp, Homo Sapiens
  misc_feature (459)..(459): n is a, c, g, or t
  misc_feature (464)..(464): n is a, c, g, or t
  misc_feature (528)..(528): n is a, c, g, or t
  misc_feature (554)..(554): n is a, c, g, or t
  misc_feature (556)..(556): n is a, c, g, or t
  misc_feature (560)..(561): n is a, c, g, or t
  misc_feature (566)..(566): n is a, c, g, or t
gggacagagtcttgctgcgatgcccaggctgaagtgcaatggtgctatctcagcttgctgcaaccttcacctcctgggttcgggtagttcttccgcctcggcctccagagtggctgggagtgcaggtgcatgccaccacacctggctggtttttgtatttttggtagagatggagtttcaccgtgttggccgggatggtcttgaactcctgacctcaagtgatccactgacctcagcctcccaaagtgctgggattacatgtgtaagccactacgcccatcctccatcattaaactttttaatgtgaaattctatcatgtaccattaacctaacaagattttctttcctatttctgactggtgcctttccccttttcaggagcaatgaaagctactctgttagttatgttcttctgatgtgacaaaatgtcaagaagataggagaagagaatattttgntttgntgatgcttttggtcccaagtgtgaccctaaacttaagctttgtaggaactgaggtctctcatgnccctttcctttactcatgcccaactntnactnnggcanttgggctt

SEQ ID NO: 59254 - DNA, 569 bp, Homo Sapiens
  misc_feature (486)..(486): n is a, c, g, or t
  misc_feature (542)..(542): n is a, c, g, or t
  misc_feature (545)..(545): n is a, c, g, or t
  misc_feature (554)..(554): n is a, c, g, or t
  misc_feature (566)..(566): n is a, c, g, or t
  misc_feature (568)..(568): n is a, c, g, or t
gagacggagtctcgctctgtcacccaggctgggatgcagtggcgcaatctcggctcaccgcaagctccacctcccgggttctcgccattctcctgcctcagcctcctgagtagctgggactacaggctcctgccaccacgcccggctaattttttgtgtttttagtagagatagggtttcaccatgttagccaggatggtctcaatctcctgacctcgtgatcggcccacctcggcctcccaaagtgctgggattacaggcgtgagccaccgtgcacggccaattattttatttttcaaacctaagaggagctcccaatatgaaagtattgtcagcaagttttctcataaaatgagaaatcttgtaaattaaacaaatcacaaattggcctgctttgcacatccagagtttcatgacctctagctaataaagatgcccatgtttgctcaggtcaccatgtgttgggctcctggctgggcatttcangcacatccatgctatcatcatccctattcttcaagtgaaggatacttggggctcanaanaggttcggngacttggctaangnc

SEQ ID NO: 59255 - DNA, 566 bp, Homo Sapiens
  misc_feature (463)..(463): n is a, c, g, or t
  misc_feature (491)..(491): n is a, c, g, or t
  misc_feature (507)..(507): n is a, c, g, or t
  misc_feature (529)..(529): n is a, c, g, or t
  misc_feature (551)..(551): n is a, c, g, or t
  misc_feature (554)..(554): n is a, c, g, or t
  misc_feature (565)..(565): n is a, c, g, or t
gacatgctttttctaaagtcttttagtatgttcctacagtatcattctcaagtcatataaactacttgctgtggtactaagtatttaaatatagatgtgctatcaacactttcttaactctagaatatttttagaaatattcttcaacatagtatgatgtcaatgcagaaatgagaaaagaactaaggatttacatcaggttacaatacattaatcaaaaaatacatttctgtgcctctatgaattcttaatattaatttttgcaattttacaaaatcttactaaaaattttggtatttctttccctatattcttcaacaatggatataagtattgttagtgcaaccagttaacagcaacactctgacgtgtttcataaaaacctatactattttataaaaaatccctttcaaaataactctttcaaagtaaagttcccaaaaaggttaatttaatccctgtngacatacttcataaaaggtcagatattngcaatattgccaaacnttacggacctaataagaagctntttaaagcaccggggttttttnccnggttatgcccng

SEQ ID NO: 59256 - DNA, 2624 bp, Homo Sapiens
ggcctttttttttttttttttttttttttttttgagattgaacatctaatctcatagttgccaagacagtctctggtgtaaaagaaaataccaagcaatagtccttaactttgaagctgtcatggttagcatatattagtatttctagactcagattttagtttaaatttatgtctgtgctatagttacaggatgatttagcaaaattgcccgcaattaggtcatgtgtaacctagtggttagggtgttacttatgatagtcgtgatagccattctaaccctgcttatactgtctgagtgattagcacttcattggtatagtttattttatggctgtataaaagtactttcagcctttttcaagttatgtcacacagaaaatttcgtttttctaggactgtaaatggatgaggcagctgttaactggctataggctctgtcattcctgagggctgagtcaatcaatatttccacccatctataaaccactgttgcacattagtgtgccagtgcacattctttgagaaattgtggatgtatggtatataaggccattcaactactcaaatattaaatgctcaagttaatattctgaggctcttaatcaagagtcttgagggttagacaaatagtagaaactaaggaatcattttcaattgaagttagcatgatattaaatatctttgcctatattggataatgtgcaaactgattcatgaaactaaatttaataatactatttttctatttgaaaaaaatggccaagtatacagtatgataaacttaattgattttcttggtttaccaaataatctttgtgaatttatgagtaaaccagccaacagattatttaaaaaatatttttaagaatatggccgtgaacattttactattttgctttgtcatgggagtaatgaggaaaagccctatgcttcaactccctagtccttaggaccccatattgatttggtgagggggctgctgggacaggaagaattttgctagtgttttatatgaactgcattagaagaagctccactcctgaagatgtcagtggacagatttgcctcttctcttctttcccttggacccagagcctgcttctattgccaggaggggagccaggaaaagagctggacttggccaagtgattaggggagtatgagaggaggagtaggaggctctgagattgagctgaaaatgaggaattaaatcaccctatgtaaagatcaccttacacaatggtcactttactctgttctttacagaaggctgtcacggctgtgtaccttgaatgggaactttggactgccattgttggtagatacagtagctaggtgtttaacttttaggcagaaatatcttgaggaattggaaggcagagttacagacaatgctggtatgtggaatactgtaaaaccatcaggttgggttcgtttatactgttgtttacattgttactgcatgtacataatgatctctatagcaaagaaatttataagatgatgatagttttgtctcctttcccaaaattatcatgaagccactgttctgttttgtcttttattagtgtaagttaagagattttgctttagtggtatttttagacttgtcaatagatttgttcttctttgatttggttttgcagacagtttcctttatataacaatgatatacgatggcaacaacccaatccaaaccctactggaccatactttgcctatcccattatatctgctcagccgcctgtttctacagagtatacatattatcagctgatgccagcaccatgtgcccaggttatgggtttctatcatccttttcctacaccttactccaacacctttcaggctgcaaatactgtaaatgctatcaccacagaatgcactgagcgtccaagtcagctcggacaggtcttcccattgtccagccatcgaagcagaaacagtaacagaggatcagtggtcccaaaagtaagtgtctggtcttgattggcttttaaatttgatattacttatattagtataagcaatttgctacttgggttgattgaccattaatgctgaatttactataaaacatattgttcactattgtaaaatggtaaagggtatgtaattcttaaaataattttctttgtgttgtttgttcctcattcttaattgtgatatgatttataatcattttcacattcctttagagagttttacataacataaggcagaaatatttacaaataaatttagtgataaaaattgcatggtgacactaacatttgtaagtgattagtgtggatcttgtgctagctgtgttgaatggctaatgcacttcaagatatttcaatgggccaggtgtagtggccacacctataatcccagcactttgggaggccgaggcaggctagtcgcttgagcccaagagtttgagaccagtctgggcaacatgcgaaaccccatctctaccaaaaatacaaaaattagctgggtatgttagtgcatgcctgtagctccagctacttgggggctgaggtgggaagatcgcttgagcccaggaggtcaagactgcagtgaactgagatagcaccactacactccagcgtaggtgacagagtgacaccctgtctc

SEQ ID NO: 59257 - DNA, 1817 bp, Homo Sapiens
gggccgggacggagggggcggcccccgcgctcggggcgctcggctacagctgcggggcccgaggtctccgcgcactcgctcccggcccatgctggaggcgcggaaccgcggggacctaggacggaggcggcgggcgctggggcggcccccggcacgctgagctcgggatgcggacgctgctgcctcccgcgctgctgacctgctggctgctcgcccccgtgaacagcattcacccagaatgccgatttcatctggaaatacaggaggaagaaacaaaatgtgcagagcttctgaggtctcaaacagaaaaacacaaagcctgcagtggcgtctgggacaacatcacgtgctggcggcctgctaatgtgggagagaccgtcacggtgccctgcccaaaagtcttcagcaatttttacagcaaagcaggaaacataagcaaaaactgtacgagtgatggatggtcagagacgttcccagatttcgtcgatgcctgtggctatagcgacccggaggatgagagcaagatcacgttttatattctggtgaaggccatttataccctgggctacagtgtctctctgatgtctcttgcaacaggaagcataattctgtgcctcttcaggaagctgcactgcaccaggaattacatccacctgaacctgttcctgtccttcatcctgagagccatctcagtgctggtcaaggacgacgttctctactccagctctggcacgttgcactgccctgaccagccatcctcctgggtgggctgcaagctgagcctggtcttcctgcagtactgcatcatggccaacttcttctggctgctggtggaggggctctacctccacaccctcctggtggccatgctcccccctagaaggtgcttcctggcctacctcctgatcggatggggcctccccaccgtctgcatcggtgcatggactgcggccaggctctacttagaagacaccggttgctgggatacaaacgaccacagtgtgccctggtgggtcatacgaataccgattttaatttccatcatcgtcaattttgtccttttcattagtattatacgaattttgctgcagaagttaacatccccagatgtcggcggcaacgaccagtctcagtacaagaggctggccaagtccacgctcctgcttatcccgctgttcggcgtccactacatggtgtttgccgtgtttcccatcagcatctcctccaaataccagatactgtttgagctgtgcctcgggtcgttccagggcctggtggtggccgtcctctactgtttcctgaacagtgaggtgcagtgcgagctgaagcgaaaatggcgaagccggtgcccgaccccgtccgcgagccgggattacagggtctgcggttcctccttctcccacaacggctcggagggcgccctgcagttccaccgcgcgtcccgagcccagtccttcctccaaacggagacctcggtcatctagccccacccctgcctgtcggacgcggcgggaggcccacggttcggggcttctgcggggctgagacgccggcttcctccttccagatgcccgagcaccgtgtcgggctggtcagcgcggtcctgactccgtcaagctggttgtccactaaaccccatacctggaattggagtcgtgttgtcattgactcaacttaaactccagcaccacgaccctgctgctatctcgcacctgaaacaagctaacatgactaacacccttaattccatccaccctcctctccctaggaggcctgcgcccgctaaccggctttttcgcaaatgggccattatcgaa

SEQ ID NO: 59258 - DNA, 570 bp, Homo Sapiens
  misc_feature (446)..(446): n is a, c, g, or t
  misc_feature (454)..(454): n is a, c, g, or t
  misc_feature (514)..(514): n is a, c, g, or t
  misc_feature (553)..(553): n is a, c, g, or t
  misc_feature (555)..(555): n is a, c, g, or t
gcattccacatcccctatcactatcccacccaggagagctgaaattccctggctgaagcggtgcaaatttatttagcagctcctgatagtacttttattttatggttgccaagaaaacttctctcaccgactctccttgccaaaatgctcagacatgatacctggcagcgggtcagcttatagatgcacttagtgatgaaacacaagaaggccagaagtcttcaggcaaagacaccaggagacaacagacctttggtggctaagggtctcctgaccatagcgccttgctctgatagcacagactggatgctgcggccaacagtacacttggacctgacagtccaaagggcataaaacagccaacaagccaagtctcttccccagtgcagacagccaagtgcaagcttgacccacagaaaccactgggtcggctttgctttctggangcagaatncaaccagggaaatgaaagcttttctgatagccagtcacttaagggcaggaaggacaaccnggatcaaagaagccttggcagaattttgagagcccccancnggaacaggatggttt

SEQ ID NO: 59259 - DNA, 485 bp, Homo Sapiens
  misc_feature (339)..(339): n is a, c, g, or t
  misc_feature (459)..(459): n is a, c, g, or t
  misc_feature (461)..(461): n is a, c, g, or t
  misc_feature (470)..(470): n is a, c, g, or t
gttttgtcctccaaattttcctgtagcaaaatgaaattgttgtctcctatcagattatagcaatcctggcattattataaaagatttcccttatctaattggaactaagaagtgatatgttttaatctgagatatttctagactgacataaaaagtaaagttttgaatttggctatatcacttaacccataaacaagcttagtacaccttacttcagattccttatgaataaattctgactttgatagaaaaattaacacaagtttattgtatgttttgtgtgtcagaaattgtgctacatgatagaaaacacacagaaacataagattctcataaggntaaggactatgaaatataaggaaatcaataaaattagccaaaatgcctcatgaaaatgcaaatcatgttttaaatgctaaagagactcatattaactgtatagaactttatattcccacncnttatgaaantgaaccaccagtgaa

SEQ ID NO: 59260 - DNA, 572 bp, Homo Sapiens
  misc_feature (493)..(493): n is a, c, g, or t
  misc_feature (547)..(547): n is a, c, g, or t
  misc_feature (551)..(551): n is a, c, g, or t
  misc_feature (565)..(565): n is a, c, g, or t
  misc_feature (569)..(569): n is a, c, g, or t
aatgagacagggtcttactgtgtcactcaggttggagtgcagtggcgcagtcttggctcactgctgcctggacctcctgtccaggattgcctcaagcaatcctcccacctcagcctcccaaatagctaggactacaggcgcacgccaccatacccagctaattttgtttatttttttgtagagatgagttctcactatgttggccaggttggtctcaaactcctgggctccagtgatcctcccacctcggcctgccaaagtgctgggattgcaggaatgagccactgtacctggcccagagcatccttaatgtggcaagcacttctaggtaagtgttaagtatagaaacataaagaagaccaaaccctagcatcagtgatcttccagttcaggagaaagcggtaattaaacatacctgtgccagacaagtgcaatgtaaatgtgttcagcacaatcaggggtatgcacaatgggctttagggaaacagagtanaggcatcaaagtcattcttataggcatgtcaggaaagacttggaagcatttccngaantttgggctcaaaanatgngag

SEQ ID NO: 59261 - DNA, 2647 bp, Homo Sapiens
cgggtgttgtaagatctggggagaggggaagtactggctccttctaatcagcaacactgtgtgggcatacaatggaggaatccagtaatggaaactataggcctgagtaatttagaacagaatttcacaattatatacagcatataggtagggaaggacatggagtatataattgtaaatattgtgtgggctccgcgcgctgcgggctgcggcagggtccggccggatgtctctgcagagcctggagtttgcatgaaactttcacctgcgctccggggagactttcggttccggctcccaccgcgcgcctcgccgccctcgcgaccgcgggctccgtccaacccggcccgacatggacgtgctccccatgtgcagcatcttccaggagctccagatcgtgcacgagaccggctacttctcggcgctgccgtctctggaggagtactggcaacagacctgcctagagctggaacgttacctccagagcgagccctgctatgtttcagcctcagaaatcaaatttgacagccaggaaggatctgtggaccaaaatcattcttggctcgggagaaaaaggaggaatccgaactgaagatatcttccagtcctccagaggacactctcatcaaggcccgagcttttggttacaacttagagaccaacagcctgaactcagatgtcagcagcgaatcctctgacagctccgaggaactttctcccacggccaagtttacctccgaccccattggcgaagttttgggtcagctcgggaaaattgagctcctctgtcacctccacgcctccatcttctccggaactgagcagggaaccttctcaactgtggggttgcgtgcccggggagctgccttcggccagggaaggtgcgcagcggacttcggggaagccaggtgacaagggaaatggcgatgcctcccccgacggcaggaggagggtgcaccggtgccactttaacggctgcaggaaagtttacaccaaaagctcccacttgaaagcacaccagcggacgcacacaggtcagtgcccacgcgggccccggagggcggtcgctggtgggcgccactgcattgcaccagccctggagggagccgggcctggctgcacaggatgtggtcagggcagactagaaatcctcacttcctcagatgttttccaccaaagctataggtctttttggagttcagatgagaatcctaaagactggacttttgattggataaatgtgctaacaattttcagtataaacaaacaagagactagatccttttctccacggacacccaaacctccaccccccaccccttagtagtgctggggatccgaggccactgcccttcaccagtgcactcgcacgaggctacctcgagcgggcctggggtttcctaaatgaaactcaagggtcaggacagagggttgctgggcagcgtggagtgtgtgggtttgatgctgacggcccgaggcccgagtgggaccggcctgctctgtaagcagcagcattgatcagcgagtgtttcctgagaacttctccgtgtctcatgcagcctttgtttctgataccgcttgaaacagtttcttaatgaaatgccatacctaggtgaaagtgccatttaaaaataccttgacatgttctaggataattggtgaggaatcacagaacatttagaactgggaagggtcttagtgatcacgtgatgcaggctcttctcttatcagtaggagagcaaattgctgagagtcagtcccagacaggcttggtgacagctgagattgagatccgggtggcccaatatccaggcccaggcctgtctcaacataccctgagattggcttgacaactttgttttctcaggtagcacttgtagtaaattcatatttatgatttgaccaaggaatgaagtgaacccagttgttcaattgccatttagagaatgattccggggccctgtactggggctttccagaagctcgtaacttcagctttgtagaaaggtagaacgtccctgaggaaactggacaggcacattccatagggaagtgaggatggaacagaagtgtgtttgggagaaacagttgccatgaagaaagcaatagctctgcctttgccggggctgtgggtccggcaggctgacacctcatcccgcaagcattttgctggtctgagtcgtggtcgttcttccacgttaactttgatgacagcaccatgggcttggctgaagctgtgtcccttggacagcagtgggaggcctgagactgggtcaggagagagctgctgttgtctctctgaggctgccagttgttgtgtgttaccgatgccagaagccactgggtccctcctcacatggcagaagaaatggaaaggaaagaaccttctcactctccccagcctttttataagggctctaatcccacctgtgagggctctgtcctcatcacttaatcacctcctaaaggccccacttcttactactatcacattgaccattaagtttcaacatacaacttttcatggacacattcagaccatacgtagcacctgctgaagaacatcttggttccttccaagttttggcaagtatgaataaagctgctataaacatgaaaaaaaaaaaaaaaaaaaaaaaaaaaaaaa

SEQ ID NO: 59262 - DNA, 541 bp, Homo Sapiens
  misc_feature (412)..(412): n is a, c, g, or t
  misc_feature (469)..(469): n is a, c, g, or t
  misc_feature (477)..(477): n is a, c, g, or t
  misc_feature (499)..(499): n is a, c, g, or t
  misc_feature (516)..(516): n is a, c, g, or t
  misc_feature (537)..(537): n is a, c, g, or t
aagatagaggcaaggtctcactatgttgcccatgctggtctcaaactcctgggttcaagtgatcctcctgcctcagcctcccaaaatgctgggattccaggtgtgagccactgcacctggcctgtgttttaaatatttttaaaggactcttttcatcagagtattcttccttgagggaaggaaaagaatttacttagaacctttcatccagtgcattcaaggtcatgcacaaagcttccaaattccaacaagcaaacgcgtggcggtgggggcaggggcaggaaggcccagggaaggaaaatgtccgatctgaaccaattaccatctcctggtcccctcggaggcatctgtggcttgacttctcccacgccccatagacccggcaccgtgtaataactgggcccgtgccctnacctgaaaactgggggtcacacggcctgtctgaaaaaccctgatgtgataaacaccncagagcancattacattttcctattgcccnactgggttaaagaaacnctttgggaaaaaatggggaancctt

SEQ ID NO: 59263 - DNA, 556 bp, Homo Sapiens
  misc_feature (537)..(537): n is a, c, g, or t
  misc_feature (539)..(539): n is a, c, g, or t
  misc_feature (545)..(545): n is a, c, g, or t
gagacagggtctctctctgttgcccagactgaagtacaccggcatgatcatagctcactgcagcctcaaattcccggcttcaagtgatcctctcaactcggcatcccaaagtgctggaattacaggtgtgagtcattgtacctggccagtcaaccattgcttaaagcgaaatatttctctacattgctcatatatagttcacaaatttaaagcaatactttcaaatgtaaactaatgcaaaatatgaaaaaaatgttttcattagtgagatgcataagaagataccactttatacccattaggatgactattattaaaaaagacagtgttggcaaggacatgaagaaaatggaacccttacacattgatggtggaaacaaaaatagtatagctactgttgaagacagtcaggcggtcctcaaaatattaaacacagaattattttatgacccagcaattcccttctaagatcccccaaagaactggaagcggaaatgcaacatatctggcattagggtcatagcagtatcccatagncncaaggngtaactcaaac

SEQ ID NO: 59264 - DNA, 2027 bp, Homo Sapiens
gtttgggtggtgaacagggatacagcaggcctcagtgaccaggcagagcccagtgaggtcaggcatggacaacgcacgcacattgggatgggaaggcctgctgttaactgggagagagaggaggaggaggtatggggatgactcccaaggaagggctttgcctaccttgatgggtttgctgggctgcgcctcagaaactggaggtcagtgccattcccatcagtgttcctactgccaggaaagtcttgcagtggctggctggccttcctgttcgactttctttccttgctcatcaaaacactttctctcccagcatcaactctacctgctccttctgcttaccacgcattccagtgactctgcccggttccaccggaagcggagttattttggaaggctggatggtgtacggtagggtggagggagccagaacgggaagccttggatggtggaaactcctctatcaccagggaacttggctgcagccccaagccctggcctcccaccagagcggggccgtccactttctccttctttttttagtactatcctctctgacccgcccagggctgggatgttgcagtgtgtttttccaagagacccggcaaacagcaacttgacaggttcaacggttcccattgacagcctgaatggactcctctgaaaactacgaaactggacacaaaaacagcccataaaaatcctgcctcccgcaggcgtctggacgctgccttttcccaaatgaccctccagcagcacggatgctgcatgggtggctaagcagcattttttgagtgattttcccaaaactggggtgttccaagtggtgtgggagtattattttttcccttgcagtaagagactaactcaccagataatttgagaaaacgggagactacatgagtcatgttactcccaaagctaatcacttgccactgtaccccaaagcctccatgaaccatgaggtgccccgggcctgcctgttatgaggtctggaactcactttaatataccgcagggaaggcagtgtgatgtttgtgtgtgccggtgagtttaagcttgaactcgatgagtgctctgcaaactttatagcacaaaggccactctctcaaggcagctcctacacgtccttctgccattgtgaccttgacctacaatccacacttcgctaatcagcatatcaaatgccaaaagcattttattagtgaaactggtaacttgttaattagaatgataaatagaatgctgaggaaaaagtaagcatcaattctctcatccaaaataaagtaatcacataatctagtctcggggacagctgaaaaattttatagtaaaaacagtgccggggagccaggcgcaatggctcacacctgttatcccagcactttgggaggccaaggtgggaggatcactcgagtccaggagttggagtccagcctgggcaacatagtgagaccctcccccatctcaataaaaaatacagaaattagctgggtgtgggggcatgtgccagtagccccagctacttgggaggctgagatgggaggattgcttgagtccaggaggttgaggctgcagtgaacaaagactgtgccactgcactccagcctgggcaacagagggagcccttgtctcaaaaagttaaattaaaaaaatttttaaagtgcagtgtacatataaaatggaatattttaatcatctcccaggttctcattggaaaggcagggttaaaaggaaatggaccaggccaggtgcggtggctcacgcctgtaatcccaacactttgggaggctgagtcaggcggatcacctgaggtcaggagtttgagaccagcctggccaacatggtgaaaccctgtctctaccaaaaataaaaaaattagccaggcatggtagcatgtgcctgtaatcccaggtacttgagaggctgaggcagggagaattgcttgaacccaggaggtggaggctgcagtgagccaagattgcgccactgtactccagcctgggtgacagagcgagactctatct

SEQ ID NO: 59265 - DNA, 526 bp, Homo Sapiens
  misc_feature (43)..(43): n is a, c, g, or t
  misc_feature (73)..(73): n is a, c, g, or t
  misc_feature (171)..(171): n is a, c, g, or t
  misc_feature (224)..(224): n is a, c, g, or t
  misc_feature (251)..(251): n is a, c, g, or t
  misc_feature (303)..(303): n is a, c, g, or t
  misc_feature (492)..(492): n is a, c, g, or t
  misc_feature (508)..(508): n is a, c, g, or t
  misc_feature (512)..(512): n is a, c, g, or t
gagacagaggcttgctctgtcacccacgccggactgtagtggngcgatctcggctcactgcaacctccacatntcgggtgcaagcgattctcctgcctcagccttgcaagttagccaggctgtttacagatacccaccaccacacctagctaatttttgtatttttagtanagacgggatttcaccatgttggccaggctactctcaaactcctgacctcaagngatctgcctgccttggcctcccaaagngctgggattacaggcatgagccattatgcccggctcatctcttaacacactntgccctataacatctttccaaaaatctttttttatgtgggtgtgcctggtggggagaaggaatggagcatttaacatagtaaataaaagtgagatattccaaatttctcatttttacactatgggataaggatgtttaatactaagggaaaaattaactggtggactggcttctatagcttaaggaatnttaaaatccactttanattnggatttccaaataa

SEQ ID NO: 59266 - DNA, 379 bp, Homo Sapiens
tttttttttttgcactttttgtagagacagggtttcaccatgttgcccacggtgctcgcgaagtatatatactcaagccatccacctgcctcggcctcctaaaatgccgggattacaggcataagccaccgtgcctgcctccagtgagacatttttaaggggtggctccatgcatttgaagcttccaaacacccaacagaatctcaccagtcaccaataaccaagatcctctctgatcctgtgctagagaaatccttaaaggaactagaagaatttcctttgtctttttttttttttttttgagacggagtctcgctctgtctcccaggctggggtgcagtggcgcgatcctggcccactgcaagctccgcctcccggg

SEQ ID NO: 59267 - DNA, 554 bp, Homo Sapiens
  misc_feature (477)..(477): n is a, c, g, or t
  misc_feature (536)..(536): n is a, c, g, or t
  misc_feature (554)..(554): n is a, c, g, or t
aagtaaagacggggtttcactgtgtcggccaggctggtctcgacctcctgatctcaaatgatccgcccgcctcggctttctgaagtgctgggattacaggagtgaaccgttgtgcctggtacaactgttatcttctttaagaaatgatgggaggccttttttccaggtatcatagtcaatatcagcacccagtttaatgtaccaacagggatttctggaccaaaatgactctttatgctttgtcacatcttgagtgagcatgatcatagactccatggagcacatttacaactgggaacacaaagtctgttcacttttcccaggcctgggccattacctgaagattaggacacccaatgatacattctactttaattttacacttcagacttctaggagtcttgcatctgttttccagcagccacaaaagacattctctaattacttctgaatgaaaaacagagacttttaatttcntgcaaagacatgcatgcactacatacactttaagaccctggggtggctcaatttctggnaaaactggacttttcctn

SEQ ID NO: 59268 - DNA, 436 bp, Homo Sapiens
gttcctcaccatggactggacctggaggatcctcttcttggtggcagcagccacaggagcccactcccaggtgcagctggtgcaatctggggctgaggtgaagaagcctggggcctcagtgaaggtctcctgcgaggcttctggatacaccttcaccggccactatatgcactgggtgcgacaggcccctggacaagggcttgagtggatgggatggatcaaccctaacagtggtggcacaaactatgcagagaagtttcagggcagggtcaccatcaccagggacacgtccatcaacacagcctacatggagctgagcaggctgagatctgacgacacggccgtgtattactgtgcgagagcctcatattgtggttatgactgctattacttctttgactactggggccagggaaccctggtcaccgtctcctca

SEQ ID NO: 59269 - DNA, 3148 bp, Homo Sapiens
ggccttttttttttttttttttaaataagctactggagaaagtgtgccttcgaaatgaggacagtaaggagagataacgacatgggaaccagggatataccacaggaaaggagccagggagaacaatttattaacaatttcttgcaactatccagggaaaatataaattatacaaaaagaaatccaaacaaatcagaaaaaaaatgaaatgactcaatagaaaaatggacaaagccattcagtcaatttaaaggaaagaagttaaacagccacgaaatgtatccaaaaaatgtccaaatctacctataattaaagaaactacatcaggtgcttgaaaagatttagtatagttaatgttagccaaatgtgtacaagaaacaagtccttttacacactgttaatgtgagtgcactgtccgaagtttatagagggcagactgacagcattttaggtacatacacttgaaaggtagcatgatttctaacagtttctacatgatacactcccttttataaggtatgacagaagactatgctgcaagtagaattagttagatatctatgcaatagcagtgaaagatctatcagaggtgttaggtagaaaaagcagaaaataagtcttatttatgtagaacgttctattgtattcatatttatgtgttttcatacacaataagtctggaaaaatacaaactatagcagttagcaataaaggagaacattcagaccagacgtggtggctcacacctgtaatcacaacactttgggaggctgagggaagaagagagacttgagcattttcccatgttgatacaccatggaggcagaagagatctccacagggcaaaaaccttgatgaggataaggacaagcacagatagaaggccaccttttctcacagggaaggatgcagttacatttattggttggtggcagaaaactgatagatgtcacttgatggcatctgctatctgttgaaatagtatttttgaagttcctgagagagaggctagaggtagcgaggtcccaagtttgaagagactgaaaagaagtctaaaatcactatagtttggcgctagagtgaacctggaaacataagagatacacaaaacataaagagtgaatcagacactggaagcatgtcccattgcctgggagtatgacccattgcctgggagtatgagacctccctgttacttgaggtaacaggcagcaatctttgaggctctgagttttgaaagccaggctcagaagcccccaggtggatccattcccagtagggatttccagagcctatgcagaggccagcagaacagaggaaaggacattggtaagggaaaagctggtggggagagtaaagacaggaggccgtgtggtgagggcctctgggttagacaacaaattgtatttgaggtgagctgtgtgggagaataacaggcccaggaagttgccacaggagcaggtggctgacatggagctcagagccatgaagagaaagatcaaagaaatgagatgtcaaagtggatgtagaaggcagccaggctggccattcaataccattcccagtttccacacaagctacaaatgtcattattacctgattcttagaaatgcaggccatgttatttcctggatttgattttgatgttatcatttgatttaaaacctgaacattatgcagaggttctgaggttctagctatgagggaaaagaggataaaatacggagaaattaagggtaaaaccgtaagtaaaattatcacataataaattcccctgatccttccagtaggaatcatgagaagtaaatcaactcattcacactgtctcagaaatttcaactaaaacgtttttaaaataagtattatacaattttctgatcaactcaacatgccaggaagtacccaaaagaaatgtaaaacctaactaataattttaaacaaccagataggataggcaatgcttattgctgaaatgtgatacttagttctaagaaaaagaaatggctgtatttctttaaaagttgcattaaacacatttgattccattcaaaatagatggagtccagattaagtattttggtcaattttgaattaaaaaaaaatcctacaaatacagtgaaattatcaattttttttttgcaggtttgagcttttaaaatgctaagacaaagcctctgctctttggggctatttagtgggcattatgatgatcagaacgctttctctgttacctgagagtgcaatttggttttcattaaaaattggatgggtttttttttttttttttttttttttttttgtggagacggagtctcactctgtcgcccgggctggaatgaagtggcatgatttcagctcactgcaacctctgcctcccgggctcaagcaattctcctgcctcaaaaaaaaagaaagttgtagtaaatacacctatgaaatgatcaagaagagatctactgactaaagcaaaggtatagatattttagaattggatcttgtatatatgaaaatttagtacatggtaaagatattttaaatcaatggggaaaggctgagcagatcaataaatgatttacagacaacaggcaatctacttggaaaatatatcctgatgctattcatacagagaagtttgaaaaagggaggcttctagttaaagacagtggcttgatatactccaaaaatctcaccaacatgacagtgaaggaattctaacacttcacatagctgttgaaggaggctaggagcggtgtgtccctaattgctagacaagttcagaaatctacaatgctagctacacctcagaatggaagtgaaggtggaggtgaagataggaacattgtaaaattctgtttaaaagcagatgctggccgggcactgtggctcaagcctgtaatcccaacactttggggggccaaggtgggcggatcacgaggtcaggggatcaagaccatcctggtaacacggcgaaaccctgtctctactaaaaatacaaaaaaaattagccaggcatggtggcaggcgcctgtagtcccagctactcaggaggctgaggcaggagaatggcgtgaacccgggaggcggagcttgcagtgagttgagaccatgccactgccctccagcctgggagacagtgagactccatctc

SEQ ID NO: 59270 - DNA, 454 bp, Homo Sapiens
gttcatcaccatggactggacctggaggttcctctttgtggtggcagcagctacaggtgtccagtcccaggtgcagctggtgcagtctggggctgaggtgaagaagcctgggtcctcggtgaaggtctcctgcaaggcttctggaggcaccttcagcagctatgctatcagctgggtgcgacaggcccctggacaagggcttgagtggatgggagggatcatccctatctttggtacagcaaactacgcacagaagttccagggcagagtcacgattaccgcggacgaatccacgagcacagcctacatggagctgagcagcctgagatctgaggacacggccgtgtattactgtgcgagggggccaagactattagccgacgtattactatggttcggggagttatccgagtttgactactggggccagggaaccctggtcaccgtctcctca

SEQ ID NO: 59271 - DNA, 570 bp, Homo Sapiens
  misc_feature (438)..(438): n is a, c, g, or t
  misc_feature (526)..(526): n is a, c, g, or t
  misc_feature (533)..(533): n is a, c, g, or t
  misc_feature (546)..(546): n is a, c, g, or t
  misc_feature (554)..(554): n is a, c, g, or t
  misc_feature (565)..(565): n is a, c, g, or t
  misc_feature (569)..(569): n is a, c, g, or t
cctatgctgtttgttttctgccatgagctttagcaatctgtttatgttgtgagtgtgtgtgtatttgtgtgtgtttccctctccagcctggctgaattatccccaagtgactcttaatcctcaaccataattcccagtgattgcactgacatgataacgggggagcccattttcctcccacccctcctcactccctccccccttgttgctaagctcagccaaggatgctctagggagctgttcatttaaaagaggaagttcacagcagggtcaccaggcttttaaacagagagagaggttgcccagggtaagaagagagctcaaagtcacaaaccctttcctttgtcctgtgaccccagcatgtggggacatcagtcccaagtcgtcactctttctgaggccactgacatccccacaagcatacctggctggcactgngactagcaaaaggcttggactgggaatcagaaaggcaacacctaccctgactagctgtttcatggtgggaaaagtgacctgcccactntggcctnaatttcccaatcncaaaaatnggcttggacanattng

SEQ ID NO: 59272 - DNA, 367 bp, Homo Sapiens
caggtgcagctacagcagtggggcgcaggactgttgaagccttcggagaccctgtccctcacctgctctgtctatggtgggtccttcagtggttactactggagctggatccgccagcccccagggaagggactggagtggattggggaaatcaatcatagtggaagcaccaactacaacccgtccctcaagagtcgagtcaccatttcagtagacacgtccaagaaccagttctccctgaagctgagctctgtgaccgccgcggacacggctgtgtattactgtgcgagaggcaggtattatcatggttcggggagacaaccactttgactactggggccagggaaccctggtcaccgtctcctca

SEQ ID NO: 59273 - DNA, 592 bp, Homo Sapiens
  misc_feature (403)..(403): n is a, c, g, or t
  misc_feature (489)..(489): n is a, c, g, or t
  misc_feature (564)..(564): n is a, c, g, or t
acaacccgtaggttttgacattttctattttctctggaaccttaaaagatgttcacaatgaacatgggctattcttcatatggtctaagatatctcccatctcatgaactcacattacttatgaaaacagatgatgtaagcattccaacctctccttgacttgccaatgttagtcatgtggggtcaagtgaaattaaaaaggccttggaaaccagagagtcctgggtttgaattctgattctgattctgtgacttcaaggatacatttttttcttttattaaaggagcatcatatgactcctagccagctggacagtgaggataaaatgagacaaggcatgcaaaacgtacagacatagaaggcacgcaataggttttacaacctctcccttgccttgattgntcttagttttattttctatttaaatcaatcaactagtttaggaataaacatgacatcttttgaacaatttgcatgcagaacttggnatataaaaaatgggaaattaggacttagggatttactggtaaatactcctggtgaatatatcatggattcatgcntttggggaggcctaacttttatccagag

SEQ ID NO: 59274 - DNA, 4800 bp, Homo Sapiens
gaggagagccgggccgccgccgtctctgcagcccgcgggtaactgggccgttgccgccgtccgcgctcggcccccgcggagagatcgagctgaaggactgcgcggctggctctcctctagtatggccaatgaagaggatgacccagttgtacaggagatcgatgtgtacttggccaagagtctggcggaaaagctgtatctatttcagtaccctgtgcgtccagcctcgatgacctacgatgacattccgcacctctcagccaagatcaagcccaagcagcagaaggtagagcttgagatggccatcgacaccctgaaccccaactattgccgcagcaaaggggagcagattgcgctgaacgtggacggggcctgcgccgacgagaccagcacgtattcctcgaagctgatggacaagcagaccttctgctcttcccagaccaccagtaacacatcccgttatgccgctgcactctacaggcaaggtgagctccacctgacacctttacatggcatcctgcagctgcggcccagcttctcctacctggataaggctgacgccaagcaccgggagagggaggcggccaacgaggcaggggactcttcacaggatgaggcggaagacgatgttaagcagatcacggtgcggttctcccggccggagtcagagcaggcccgccagcgccgtgtgcagtcctatgagttcctgcagaagaagcacgcagaggagccctgggtccacctgcattactatggcctgagggacagtcgctctgagcatgagcgtcagtacctgctgtgccccggctcaagcggggtggagaacacggagctcgtcaagtcacccagtgagtacctgatgatgctgatgccacccagccaggaggaggagaaagacaagcctgtggcccccagcaacgtcctgtcgatggcccagctgcgcacgctgcccctggccgatcagatcaagatcctgatgaagaatgtgaaggtcatgccttttgccaacttgatgagcctcctgggcccctccatcgattccgtggctgttctgcggggcatccagaaggtggcgatgttggtccaagggaactgggtggtgaagagtgacatcctataccccaaggactcgtccagccctcacagcggcgtgcctgctgaggtgctctgcaggggccgagacttcgttatgtggaagttcacgcagagccgctgggtggttaggaaagaggtggcaaccgtgaccaaactctgcgccgaggatgtgaaggacttcctggagcacatggccgtggtgaggatcaacaaaggctgggagttcattctgccttatgatggggagttcatcaagaagcacccggatgtggtccagcggcagcacatgctgtggacgggtatccaggccaaactggaaaaagtctataatcttgtaaaggaaaccatgccaaagaagccggatgcacaatcagggcctgccgggctggtctgtggggaccagcggatccaagtagccaaaaccaaggcccagcagaaccacgcgttgctggagcgggagctgcagcggcggaaggagcagctgcgggtgcctgcggtcccgcccggtgtgcggatcaaggaggagcccgtgagcgaggagggcgaggaggacgaggagcaggaggcggaggaggagcccatggacacttcccccagcggcctccacagcaagctggccaacgggctgcctctcgggcgggctgcgggcacagacagcttcaacgggcacccgccccagggctgcgccagcacccctgtggctcgggaactgaaggccttcgtggaggccacctttcagagacagtttgtgctcacgctgagcgaactcaagcgcctcttcaatctgcacttggccagcctgccccccggccacacactcttcagcggcatctcggaccgcatgctacaggacacggtgctggccgccggttgcaagcagatactggtgcctgtaagtagagccctgcctgccaggggcatggggggtggggggtggggagaaccagctgttgggaggccacgtggggacacgggaggccatgcttggtgagcatctgctctcacgtgggcctaggtgtgacatgggcaagtcagcctctctgaggctctattctcatgaaatgggatcatgttgggttttatgtcacaggactgtggtaggggctaaatacggtgtctgaaggcccggcctattgcctggcctgcagcagggcctagtgaaacagggcccctgcctggtttctcaccctgtcccccaccaagaacacctgtttcctactagctttgccattgtttggaatgatttaacttctaagatcgtttgatcttctttgcaatctgcagatgaagaaactgaggctccaaggaatgaaatgtacgtttaaaggtcactacctaggaggtagtagagctggaatttggacctcagtatagtggcctggagttttgaatcctttctgctcagctaagatgagctgcttccccacagctgcgccacgccccagcttgggcctgggtcctggcggcctccctgtgcatcagaagcaagctgaccagctcagcgctgtgctctcagcacttccagtgccaggccttgagtgtggtattgcaagcctcctgccccttccccctgggctgcttttctgtcactgggaggggccctgacgggggagcagagtgcttgctggggaccgtttccctgcgctgaggatagagagcgccaggtgctgcctgaggcacgcctttcccgtgctccttttccacaaggctctgcccagacctggcagcaaaatggggtgaggtggggctgtggtggtctctaagaaagcattgatgttttcattgccaaggtcaggagcgggcctgcagccttgggtgatgatctgaggccaaggcccatccctgtgtatgaggaatagaaactaggacaggaggccttgtggagcctaggctgtctcaggggatcggccctgctggcaggcagccccctgtgggaggtactggcagagttcggagctcctgcccacccagcacatgggtctgggtctccacaagctcacctttcttcatgagctgggccaggacaggcaggacacctgcctgacattagttgttttgggccgctggagtggacagaggtgaggggtgggacatggccaccctcagacaccctcacccctccttccggaccccctctgtccatgttgctttggggtggggccagcgtctccaggagacaccatggccctaactgtaatgctctccttgccatcctgacaaggagactgtattgtagtcacatccaagacgtaagagacctccgatcccagccacctctgtgttgtacatgagggagctgaggtccagggcaagtgaatagatcgagaacttgacttgaactcctggttctgctgcttattagctgtgtgaccatggacagtgagcaaacctctctgagcttacttttccccatgtactacctccccagtttctaatgctcaaatgcaaatgtgtattggaggcctcacagggcttttactggtagtaaccattattgctacttgtgtgatggaaccaggactggaaactaccatcccagatgccccctcccctgtccccttctctccaggacccaggcctgtgtcacacttgtcctggtctacctttggaccaagtggcctggattgcttgggagtcaggcagtgcctctaacccacactgacatggtacatgtgggaagcagttgaaaagaacccccagggtaccccaagagttatggggaagggggcgcccctccatcagggttggcatcttcaggagggaggactctgggtgttaaagcacagttgagttggtgccaggctgatgggaaacagacgcagcttccccactgtacggaggatatctgcagactcgaagccgggcatttcactgggcccatcacactccccctctcgctgaagccctgtcaggccctggggggtgtgctggcctcctccccatggtgaggtgagaggcacaggtttgtggctgcccaaggccctcagagatggtgagtagcagaagctgggattggaacccatgttcctgcatctgggctggggcagacagggagggatgaggcaagcaaatggatccatggggtagagatggacaagcaactcacccctgggccttggtcagtttcccccccagactgctgcttccccggatgagcagaaggtgtttgccctctgggagtctggagacatgagtgatcaggtgaggtgaactttgctgccatcttcccgaagagccaggggggtttcctgcagcgttggaggccttgggggacatgtgcacccaaagtgcagccacacatttcagattttctggcacactcggttttaaatatcctgctccaactctgtacgctaacaaaataagctgtatgtgccaatagtttgaacctaaaccagtggttcccagatgccagtctgtgagccagctccatcagaatcatcttttaaaaaatacaggctgggcgtagtggctcacgcctgtaatcccagcactttgggaggccaaggtgggtggatcacctggggttgggagtttgacaccagcctggccaatatggtgaaaccccatctctactaaaaatgcccatagtcgtgggaggctgagacagaattgcttgaacctgggagagagaggttgcagtgagccgagattgcaccactgcactccagactgggcgacagagcaagactgtgtctcagaaag

SEQ ID NO: 59275 - DNA, 378 bp, Homo Sapiens
caggtgcagctggtgcagtctggggctgaggtgaagaggcctggggctccagtgaaggtctcctgcaaggcttctggatacaccttcaccgactactatatgcactgggtgcagcaggcccctggacaagggcttgagtggatgggacggatcaaccctaacactggtggcacaaactctgcacagaaatttcagggcagggtcaccatgaccagggacacgtccatcagcacagcctacatggagctcagcaacctgagatctgacgacacggccatgtattcctgtgcgagagggggctattgtactactagcaactgcaatcttaaggatacttttgttatctggggccaagggacaatggtcaccgtctcttca

SEQ ID NO: 59276 - DNA, 474 bp, Homo Sapiens
  misc_feature (113)..(113): n is a, c, g, or t
  misc_feature (190)..(190): n is a, c, g, or t
  misc_feature (226)..(226): n is a, c, g, or t
  misc_feature (288)..(288): n is a, c, g, or t
  misc_feature (293)..(293): n is a, c, g, or t
  misc_feature (314)..(314): n is a, c, g, or t
  misc_feature (317)..(317): n is a, c, g, or t
  misc_feature (329)..(329): n is a, c, g, or t
  misc_feature (369)..(369): n is a, c, g, or t
  misc_feature (393)..(393): n is a, c, g, or t
  misc_feature (397)..(397): n is a, c, g, or t
  misc_feature (409)..(409): n is a, c, g, or t
  misc_feature (441)..(441): n is a, c, g, or t
  misc_feature (443)..(443): n is a, c, g, or t
  misc_feature (454)..(454): n is a, c, g, or t
  misc_feature (469)..(469): n is a, c, g, or t
gtttgtattgttttctgctagttattaaattgcagtgaatgacatttgtgtaaaatatctatagtcccagcttgagctcattcaatcaacagcaacaacataagctaatgtanaccgagttcttttgtgccaggtactattcttatgctgaacttacctcatttcattccatcccatcaacagccttgtnaagtaagaaaaatgaaacttgctcagcaagaatgtnaaaccaggctgtcaagctccagggcccaagcatttaaccaccattccgtgctgccaacctantgtcnatttcatttccagcacaagtnatncaatctgaaaanccacttgcttggaacaatgttgctttccttcttcaacacnaattaccccccaagaataatgacnttcnaccccatttctnttaaaaaggaaacaggacaattggtgggtccncnctgtggggganatcaatgctactttntacct

SEQ ID NO: 59277 - DNA, 1731 bp, Homo Sapiens
gttttcaagaccatcacagaccaggtcctaatgggtgtggaccccaggggagaatcagaggtcaaagctcagggctttaaggctgcccttgtaatagacgtcacggccaagctcacagctattgacaaccacccgatgaacagggtcctgggctttggcaccaagtacctgaaagagaacttctcgccatggatccagcagcacggtggatgggtaagcgtatcctatttacaaattttctcagaactcagaagagatgggatggattttttttttttttttaaatgaagggaacacatctatgaagcagttctcatgagtttaggacacttgagtggccagagatagatcccattgatgggaacatatttttagtgattatcttcatcatcaataaatatttactgagctctccaagggtatgcagggtatgtgtggatggaaagggactggtcagatggaacaggaaatgaggagatgctgagataagaaatgtttagatagacgtaatttctgttttcacaaattttgcaggcaacggaagtctggcagggagacaagggcaggcagacagttcctcacacttgcagatacttagaggtcacggagactaagcctcatgcagagactcagggttcatggcattttgtcattgctgctttgacccagccattttgagggtgacattttgataccaaataaaaagccaacagttaaactttcatctattttcaattacctggtatcagtcaaaacagacctctttcccttttgcctcaaaccctctcccatccctcatccccagttcctcaggtctccttaagactgccatgttcaaacagctacataaggtccaccgtgtcaaaatgtactaccccacaactttaactctcaacaggcctaggcattcctaggcggacagaccttcatcccacattatccttagttctctttccactagaatggtccaggggccagcaggaggattgagtcggctctaggcatggctggagtgaccctgggacctccacacagccttggtctctttgctgatggaaggaaagtgcagctgatcttgcccaagggtctgaagtgcccgccatggtcttcagtggctgccacggtcttcagtttctgtacattgagttcctttctattttccacttttgcaccaagtttgataaccctaagtggctgatctgaacaaccaaggccattcttaagtattctaaacttaagctgccttagcttattctaaaaggaggacaggttcctcaacattattttagttctacctattcttctttccaggattccttcaccccaacaacccccttgagccctcatctgccccaaagcctctcctgacccttccagctcaaaggctgcacagtctctaatctccagcacttcatgtttgcaccataataatatacaaaagatgatcaaattcccaattgactatgtttcaagcattcattttaaaaatcattgttagtcctcttaatatattttctcagagaaattataattatcaattgggttcacaggctagctctcaaaaatctgtttaacccactaatgtagctaaaataccataaatatgctattaaaaagcagtggttctacaccaaaagcacaagcaacaaaagaaagaatagatacattggattttgttttgtgcttccaagaacaccaccaccaagaatgtgaaaaaaaaaaaaaaaaaaa

SEQ ID NO: 59278 - DNA, 1542 bp, Homo Sapiens
gacatctggtcactggaggccttggctggtggtactcaaagacaatcagaatgcgacatcagctttgttcaagcagagattctgagtcaaatcactcctctggcccccaataccaggatggggcctgtcttagctgggccccactttacatctttgtgacttttgtcagctcacccccagcctggtgccagcccagtatcagttgtagggaaatctggtaacatttctactagctaacacgtgtccagtgcttaccacgccctaggccctgagctacccaataactgtgttctttggttctcaccacaaccctatgcacagaggaaatggaaggcacaaagtggtgaagttgcttgcccaagaccccgtagctggtatgtggcagagcataaatgcaaacccagttcttctggctccagaatcctgccctagacgatgacacttttgatcagcagtggatgcaccccaaatcatgcctctgttattgaccaaagcctgatccactcacccttgagtttgaggcccactgtgaacctgcccagaaatgcctacctccaagccctttcttcctccactgctcccacccagccaaagcagacaggcagctgctcccccagaaccacttcctacttcctcatcactgctgatacggttctccctttagggatgctcttcccctaagatctgcctctaagattccactcaagggagcctccttgataccccaggtggaaggggtcactccttgagcaccaagtccacccccatcacaggaccctctgtgtgaccttctagtattgtttatggttgtgacctcactgccctaagactgtctacttctgaccccacaagggctagcactgccctcagaaagctcagccactgtttgctgaatttaattaaaaatacatctctaataacctctttgtaaaatagcttggcagtttcataaaaagttaaacgtacatcttcttcacgagccagcagttgtactcctaggtatattcctacgggaaatgaaagcacatgtctgcataaaggttcatgtatgaatattcacagcagcattattcataacagccaaaacctggaagctgtcaagatacccatccactgacgaatgattcagcacactgtggtatagtcataaatggaatactactcagccatgaaaaggaacaaattcctgataaacaccacaacatgaatgaattgcaaaagcagtgctctgagtccaagaagctgggcagaaaggagttggtgccctgattccatttttctcaagttgtagaagaaacaaactaatctacggtaggagaaattcaaattcagattctccccatccccaccagttacctctggttggtggagagggggagaattggcaggaaaggggcacaaagaaactttttggggtgatggaaatattttgtaccttgctttagatgttggtcagatggaatatacgtttgtggaaacctgccaaactgtacattgaatatctgtgtgtttttaccacatacagttaaaactaaaaaaaaa

SEQ ID NO: 59279 - DNA, 824 bp, Homo Sapiens
ctcaatcagctttatgcagagaagaagcttactgagctcactgctggtgctggtgtaggcaagtgctgctttggcaatctgggctgacctggcttgtctcctcagaactccttctccaaccctggagcaggcttccatgctgctgtgggcgtccttgctggcctttgctccagtctgtggacaatctggctcttgctctgttgcagattggcagatgccgcctccctatgtggtgctggacttgccgcaggagaccctggaggaggagacccccggcgccaacctgtggcccaccaccatcaccttcctcaccctcttcctgctgagcctgttctatagcacagcactgaccgtgaccagcgtccggggcccatctggcaacagggagggcccccagtactgagcgggagccggcaaggcacaggtgggagcccaggagggggatgagcccacagtggatgaggtgggctgcagtgcttggctaagaggagagcaccacctgctcccactgtggggggacgtgctctcctggggggcccttcacagacactgaggacacgcgcaggcccagggtcagggctgagcttccctccagtgcagtaacgaggattccgtccaggctcccatgagcaggccagggctgagacagagggcgttggcaaggatgctgctcttcaggctgtgacccctctgtctttgcagggaggaagtgtggaggaacctcttggagaagccagctatgcttgccagaactcagccctttcagacgtcaccgacccgcccttactcacatgccttccaggtgcaataaagtggccccaagg

SEQ ID NO: 59280 - DNA, 2040 bp, Homo Sapiens
ctcattttgctccaaattttaagttgcttcagaaatttaattagccctctgcttactctacaccatggaaaaaaggtaatatagtagaaattctgatagcaatttcaaaagatgtccaaaatagacattaatcattggaatgtctttcattgttaataagcacagtattaagtggtttaagttctagaatgattttaataaagtcatttatgatacttagctgtgcattccaaactgtaaaggaaaaggtaaaaaatgctacttaaaaataagctaaaaaccaagacagtcggtgaggtctgtggaaatggtagtattcatcttgggagaaacatgctactggaaaggcctggatttgtctagatgggagtcattaagactgtgggacctaaagtattcagcacaataaagcaacaggacatttcaatgttttccctggtagcctgagagagaagagggttggggttatgggacccaggggaagaccgaagacaaatctttaaagaaaaagataaatatgggtaagggtccctaaggcagtgacggcctaagcacactggtactatcttgactatcttgtggtcaaagttatttcctcttctgtgctataatcctctcctccactaatccactctgagtaaagatctgttacacaccatacccttgttcatggtgcccaggggaaatgaagaggagagtattacaggcaactggaagattaagcatcccagaccccattctgaggtatcagaaatattgaggaggatactggacttcctaagattatgtggaatgggggcctacaactttttgtgtataggaaaataatacctcagagggcagagggcaaagggaaatgaggacattcctaactggtctctctgttttaccttttatgctcctctaatccattttccatccagactgatgtccaaatttaaaggtctcatcgctcccctgcttaatatacttgaatgacttcttatgtaaactttgtcatgatctaaaagttcccgctagatctgcaattgccttcctccccccgtttcatctgtttagcagaccgagggcaccagtctctgtggtttaaacttgccaaacttttcttcacggaagttttgctgttcttttctccactagacagctgttccagaagttcttatgtctgattccttctcattcttcatgcctaagcttaaatataacacaagaagcccttccctgattattctaaacaggggccttgcctattgatagtttctattacagtattatttatagttccttaattgccccataatgatgcagttattttacttgtatttttattatctgtttgccccataaatattactctcataaagacagagactgccctgttctcctttggagctcagtaaaacaaatatttgttgaataaatgaatatttgaagttagtctttatggaagcattataactttggttgtaagttttataatttaatattgtttataactctgaagataagtgagtctaaaccaggaaaatttacatttatactttaatgaataaaaatcatgaatacttacaaaacattcactattgccaagcattatatatacctagtattttacaaagccttctcttgtcactttcatagctactctaagtgatgggtcctgtaaccctgatctattggaggttaaactgagattcagagttaacttgtccagggtcacacagtaaattaattgtatcttaaccattaaaaatgtcatatgaggccgggtgtagtggctcatgcctataatcccagcactctgggaggctgaggcaggtggatcactttagcccaggagttggagatgagcctgggcaatatggcaaaactctgtctctacaaaaaaattaactgggcatggtggcatgtgcctgtagtctcaggtactaggaaggctgagttgggaggattgcttgagcctgggaggttaagcctgcagtgaaccgtaagcgagccactgtactccagcctgggtgacagagtgagagaccctgtctc

SEQ ID NO: 59281 - DNA, 1382 bp, Homo Sapiens
taattttcttgtttttaaaatgtagttctggcctggcgtggtggctcatgcctgtaatcccagcactctcaaactcctgacctcgggtgatccgcctacctcccaaggtgctgggattaaaggcgtgagccaccgcgcctagcatatgtttatttttaatttagaactcatcgtggcttgtctatatacattgaaataatgatgtgacacacaaactgttgtgaaaaatgtcagttactttgaatgtaagcattttttccaaaatcacttatgtgtctaaaccaattccttctataaatcagtaagaaaatgataaaacaattcaacaggaaaatgaacaaaggccagaaaactcagagaagaaacacaaatgttcaataaacatataaagatactaaattaaattcatgagtaatcagaaaaattcacatttagatggaatcccttttattcatccataacttcagcaaaaagttggagaatacccagcggtgaaaaggtgttgggaaatgaatgctgtcatattctgctgacaatagagtaagttggcacaaaatttttgaaggcaattaaaattttatatctacatagtcttcaccccaagaattccatttccagatatctatgctacaggaatacttgcacatgttcacaaagaagcatgtacagggatttcattgcagcaatgcatgtaacaagaaaactaagcataatctaaacattcatcaatgggggaattattaaataaaccatgatgcatccatactatggattatgcaggagtttaaatgaatggggtgaccctctcagtactgggaaggaaagaaatctaaggcatatcatgaagtgaaagaatcaagttgcaagatgttaccctttatgcgaagaaaaaattttaaaaccacaaaacaaatctattttgctttatgtaaatatgtatgtaggtaaatgaggaaaagtctggaagcatgtatactaaatgcagagtagcattacttcagggatgagggagtagggcacaaggagagtttttgttatatctgttattgcatttttatatattaaaaatggaatcatgggctgcgggtggtggctcatgcctgtcatatgaacactttgggaggccaaggtgggaggatcacttgagcccaggagttcgagaccagcctaagcagcataggaagaccctgtctctacaaaaaatacaaaattaggtgggtgtggtggcatgcacctgtggtcccagctactggggaggctgaggtgagaggatcacttgggcctgggaggtgaaggctgcagtgagctgtgattgtgccactgcactgcagcccagaggacaaagtaagaccctgtctctgaaaaaaaaaaaaaaaaaaaaa

SEQ ID NO: 59282 - DNA, 2380 bp, Homo Sapiens
cggacgcgtgggttctgatctctctctgcgtgtgccagctccaagtgagcacagactggaaacacccgacacctcacctgaaaactctttcagaagagggcaggcattgtggatattggtcttagtcgtagcagtagagcttccagtagacatttaatttttaaaatttttatggattaccatgtaatccaagaaacaggaattgccactgctgtgatattagttctcaggtcaatttaaagctagccttgagcagacaggggattaaataacgtgtccatttcagtgacctttcattctgtgtgagatcaccatccccttgaagttggcaaaatgagaacctagactgctgaagcctgcctctaatgagccactgtaggtatatcttgggagttctccatggccagggacctgagctcatgtccaagtccttacagtcttataggactgtccatagcgtgaattggtacaatttgttttttcctcagctttccccaccatggtatgaggtaagaagtgctgctctgttgacttagatagaaatatccttctgtccacttcacaggtttaaactggacccatgtaagttcagctctgaggctcaaatttggactgaatgactttacgtaattcaatgtttttcagatgtacaactgaagagactataaagctttagaactagcttctgtttaatccccaccattattgagtgacaggccaaaacataggcgtatttaacacagaactatgatataaccctaacccaaccacccttccttccttccttccttccttccttccttccttccttccttcgttccttccttccttccttccaggttctggctggtgtagtttaatttctttcctatcaaaatgtcttaccctaaatgggtaagaaaataattgtataacttgttagcttgcaggtagggaaaatttttttcttttttctgagacagagtcttgctctgtcacccaggctggagtgcagtggtgcgaccttggctcactgcaacctccgcctcctgggttcgggtgattctcttgccttagcctcccgagtagctggtattacaggcgcccacactgggctaatttttgtatttttagtagagatggggttttgccatgttgtccacactggtctcggactcctgacctcagttgatccgcccgcattggcctcccaaagtgttgggattacaggcgtgagccatcacgcccggccaaaattttaaaaagaaaagaattgtaaaacacttttaaaatgaagagtttattagatgtgcttcccaaaactggctctgtaaatccattatagagaacttttgatagtgtccaccttcttgcttcattccccttagggatttactgcttactactaccaggatctctttctacccagataacactctgacaccaaatgtgtaggtttcttacaccaaaaaattcagttctctgcagacaccagctgggtgtcctacgatttaattcaattctgacactacctggagttagggcagagcccacaggttaagggctctgtcccacaggagtgcctcacacttcagacaccaatcacaagtagtggttcttcagattacccacacttctgtccaacttggctacaaatcagggctcccacaaccccttcctcaggctcaataatttgctgtaatggttcatgaaactctgagaagcactttactcactattactagtgattttaaaggttattataagggcacaggtgaccatccaaggtgacgatgtacatagggcaagttccagaagggtccaggagcttcagtccccatggagttggggtatataccacctcctggcatatagacatgctcaccaaccggaagctctctgaacccctcagttagggtctttatgggggttccattatgtatgcatgattgattcattcattggccattggtgattaactcaatctttagcccctctcccctccccaaggcctggtggaaggggctgaaactttcaaccctctaataatgccgtggtctttctggcaaccagtccccatcctgaagctatccaagattcccgaagcccggtcatctcattagcatgcaaaagacacgcatatcactctggagattccacgggttttagaaactctggtccagcctggccaacatggtgaagccccatctctattaaaaatacaaaaattagccaggcatggtagcatgcacccgtagtcccggctgctcgggaggctgaggcaggagaatcgcttgaacctgggaggtggatgttgcagtgggccaaggtcgcgccactgcgctccagcctgagcaacggagcgagactctgtctcaaaaagaaaaaaaaaaaaaaaaaa

SEQ ID NO: 59283 - DNA, 1496 bp, Homo Sapiens
atttctagaggcgggcttccctcggaaaacggagggttgaaacccagaaagctcctcggagcccttctggggttcgggcgatctgggcagagaactctcgggtggcaaggaattaagggcagcgcgaacgacggtctctagacaagtatgaagcctcccctgagtgtgtccggcgctcagggggtggaccggggtgttggtttcaaggagggggccatcgtttgcaccacggcgtccagaaatactcatcctttgcccttcggggaggcaacagagcagccaactgactgttctggccaaagagactggagatccagtatcagcaagctactttcttggtaaacctccatttcccaatgctcatctttgtcctctacccccacccatcccaaggcaaatgatgaaaacatctattggatccagcctttgctatcttctccatgctgctcatagtgggtctagcaatgtcccattctcggtaatgtttggtaggtctaaaacatcctcacgaaatgttccccaaatgttctgctccagctgagcaactaataacaatgggaagatgcagaaaaaaaatgcatggagcataacgttagttttgggactcgtcagtggcaacgttttagagatgccatgaagaattcctggtaataatccttcttcctacagcatttagcaatgaatactatgggattacggctaaaagatggtcaagactgcctcagccattaggatcagaattctaagttccaaagaagagcaaactcaagaggatttcctcaggcctctgactatagatgctgcctggggagaacaggtgctacactcaaaacattctcattttatttatatcctccctgaactagtacccaactccataaccccagactcaaataacagaaataaaagccatctcactgattataagctctctagttattacaaaaataaataagcatcaatcaaccaacaggcatcagaatgagaaaatcactgatttgagacattcaggctgcaggaaaagaacactttttgttaatatgtaactatatcttcagtagtacagaaaaatgggaagaacgagagttcttacctggatttgcggctcacttaaagtagagcacctgagatgctgggaaatcataaagataaataaccaatctaacaaattcctgccatgagaccaaagtgatccttgactactctattagtaagcgactctgagccaagagtacgaacctgtaagtggagtggtggttggcccattagaaatctctgaaagatctaaacatgacagttaccttcctactggactcatacttctcaattccctctcctaaaagaatacttttgggctggccccagtggctcacacctgtaatctcggcactttgggaagccaaggtgggaggattgcttgaggacaagagtttgagaccagctcggtggaaacatagcaccatccatgtctctaccaaaaaaaaaaaaaaaaaaaa

SEQ ID NO: 59284 - DNA, 2202 bp, Homo Sapiens
ttcctcgagcactgtggccttttttttttttttttttgaattttcgcacctcgcgagttgcggagcctgcatctctgaagctgcctcggtgaagagccacagcattatttttttttctctttgggagagtagctgtctgggatttgagatcctatcttccctgcaaattaccaggttgcatcttcactgataggaatacatttcttcaccaaaggacatggatgaaaatgaaagcaaccagtctctgatgacaagcagccaatatcctaaagaagcagtaagaaaacgtcaaaattcagcacggaattccggagcaagtgattcttctaggttttctaggaaaagcttcaaactggattatagactagaagaagatgtaactaaatccaagaaaggaaaagatgggagatttgtgaatccgtggccaacatggaaaaacccctctattccaaatgttctcagatggctgataatggagaaagatcacagcagtgttccaagttctaaagaggtagcgcttggcttttttgagtgctttatatttgctcttcatatatgacactctagttatttgagcccttgtatatcataaggcatagaattaggtctgaggagataaagtggataggtgtaacctaggccctaaagttcatcgttcagtagcagagtacatataggaataaccaaccctgatctggtggcaactagaggtaggaacagagtgctttagaggtacaggaaagaacgtgatgctgacaggaagagctggagatggcttcacagaggaggtgaatatttcagctgggcctagtcaactaaaaagtattttgacagtgattttccaggtagatgatggcatgaacaaggtcatgaaggtgagacagtgtattacctgctctggaaggtagtagcctggtacgtgtgtagaatatggatcatgagggtgaaggcatggcctggagtgcttggcttttaacccttggataaggctaccaaagctgtgaaagggagcttcagatgacctttccagaccttgaaaagttgactttaggttcctagcctttaaatgtactagttttacttaagatgattctacttggccttcttctattctgttagaatagacagatcacagttttgggttaagttgatttcatggtttacattgagtatatcaatatttttcattggtgaatgaagtaagtactatgactgtgtctcctttccttatatacctctccctctgctgtgttaacaacatctctttcatctgcttgactttctgtgtatttatgacaattatttccctgcctcctatggcctctcaatgccattttcctgagggaaagactctcaggtggtcgttcagcagtgggctgtagtctgagctgatgccttcccagggtctctgccgacttacattctagggcacccttcaccagcctcctgggctcccttgtgtcttctatggtcacccttgttttctgcatcccacttgttcctctttctgtgtcattttctcattttggtggagcatattttcagtgaacttcctgagaaagggtacatggaaagtaagttttttgaattcttgcttgtctgaaatgtctttattctcattcataattgataatttgggtatagaatttttgtttaaaacagttttctctcagaatttgagagtattgcctccataactttatttctagtgtggctgtggggaagttcagtgccgtccttactcttgatcctttgaacaggccctttgttttctctctagagactttgagaatcctctctttggcaccagtgttctgaaaattgccacgatgtgtagttctttatttattcattgtgctctgtgtgtggtgggccctttcagtctgaaaatccatttccttcagttctaggaaatttcatctgtatctttgaaaatgtccttccctatatgtttttattctaaaatgactattagttatagtagttctattttggacctcctggatcaattctctgtaatttaagaaaatttcttctatgttttatctttttaaaaatttacatggctaggtgcagtagctcatgcctataatacccacactttgggaggctgaggcaggtggattgcttgagctgaggagttcgagaccagccggggcaacatggcaaaatgccatctctaccaaaaaaaaaaaaaaaaaa

SEQ ID NO: 59285 - DNA, 2647 bp, Homo Sapiens
aaaatgccaaaatattttaattttcttaatactgtcataaattgaattgttatttacatttttattttctattctttcactatatatagaaatacaattaatttttgtgttttgaacatgtatcctgcaactttactaaattgacttatattaatccttgtaacttttttctggatttcttagagctttgtacatacaaaatcatgtctgcaaataggacagttttacttcttctttccaatttgcctttttctttttcttgccttattcactatctgggtcttacaatacaaatttaaatgcaaatagtgagagtggatatgcctgctttgctttgtttgtgattttaggtagaaaacattaaatcttcaccattgagtttgatgttagctgtagattttttttataaccttaattggatgaggaagacttctattcctagttgttgagagatttagtgatgaaagagtgttgatttttatcaaatgttttttctgcatccatttaaataattatatggttctttttctgttttctattcatagagtagattatattgattgattttctgatgttaagccaaccttgcattctgagataaaccccacttggatatgatagatagtattctttttacatgttattggttcttatttgctatattttgttaggaactttttgtttctatgctcatgagtaatattgctctgcagttctattatcttgtgatgtatttgattttctaataaaggtaatgttagccccataaaacgatctgggaaatgctccctcctcttttatattttgaaaacgttggtgtaagattggcgtcatttcttccttaaataactggtggaattccccagtgaagtgatctagatctggagttttctatgtgggaaagtttttattattaatttaaatagggctgccaaattttcttgaggcagttttggtaaatttgctttttaagccgggcaaggtggctcacgcctgtaatcccatcactttgggaggccaaggcaggcggatcacgaggtcaggagatcgagaccatcctggctaacacagtgaaaacccgtctctactaaaaatacaaaaaaattagccgggcgtggtggcgggtgcctgtaatcctagctactcgggaggctgaggcaggagaatggcatgaacccgggtggcggagcttgtggtgagccgagatcgcaccactgcactccagcctgagcgacaagagcaagactccgtctcaaaaaaaaaaaaaaaaaaaaaaaaaatttgctttttaagtagtattttatctagatcgtcaagcttatcagcatggaattgttcacagtatgcccttcttattcttttcatgtctgaaggacgtgtagaaaaaccccttctttcattcctaatggggatttgtctcctctgttttcttcactagtctggctacagctggtgggttttattgaatttatttcaaaaacgtggcttttggttttattgatttttctctacttcttttttttttttttttttttgagatggagactcactctgtcgcccaggctggagtgcagtggcacgatctcggctcactgcaagctacgcctcccgggttcacgccatttatcttttctattttattgatttttaccctttatcctttccttccttttgtttactttgagcataacttggacttatttttataatttcttaaggtggaagcttagatcactgagctttatttttagactttgcttcttttcccatgtaggcattaaagctacatatttccctatatgttctgttttaccctacatcccacaaattttgatatgctttcattatcataggtatatgatatattatcaacatattttctaatattacttgtgactcttctttgatctagtgattattcagaagtatgttgaagtccagatatttgaaattttcctggttatctcattattattgaattccagtttaatcctttgtggacagagaacatagcctgcgtgattttaaactattcaaatttattgagttgtgttttgtggcccaaaatatggcctatcttgacaaacacaccaggtgcacttgaaaataatgtgtattctgccatttttggtgaagtgttctataaatatcaagtcaagttggttgataatattgttcaaaacttctatgtctttactcattttctggtctaattgttctagtagctgctaggtagagatgttaatatttgcagtgatgtttgtggaactatctcttctgcactttcattctgtcagttacttgcttcatgtatttttgcttcatatattggatgcatacaaatttcgactgttgtgttgtccttgacaataagacttttatcattatggagtaatgaaattgataatacatttcttattgtgatataattgacagaacataaaatttcatacaatataaaattctccacttaaaaatatgcagtgtacattttggcttaagtatattttgtctgatatcagtctagccagtctagccttttgatgtctactgtttgcatggtgtatttttccacccattttctttcaacatatttgtcaatatatttgctggttcttctctaataaacatatagttgggtcttgtt

SEQ ID NO: 59286 - DNA, 1293 bp, Homo Sapiens
gctttttttttttttttttttttgagacagggtcttgctcagtcactcaggctggagtggagtggtgcaatcacaatcacagctcactgtagcctccaactcctgggctcaagtgatcttcccacctcagcctccgaagtaactgggaccacaggcatgtaccaccacacaaagccaattttttattttttgcagagatagtgtcttcctatgttgctcaggctggtcttgaactcctggccccaactgatcctcccacctcagcgtcccaatgtgcttggattacaggtgtgaaccaccatgactgaccctagatgtttatctttaatagaaaaaaaaataggttaaaaaaagtcatgcccaatattaggggaacaattaagcaagaagccctcccttactccaccaatcaccaatcagatttaataccttcctttgtgggtggttagtgcttacatcttagcatttcgactgagttgtactatacatagtcatacccaagtctgtttcccttgctggactgtaaactctctgagtataaatttgagatcctattcagatctgtattatatcccttaccatcttttgggtcttttaggcccctcctccctaccctcagcatccagcacaatatttcactaacagcaggatatgaaaaaatcttaaggtgaaccactataaaaagcaattaatcaatgactttagagataaaataattttatatagaaaaagacatataaacactttagaggtatgaacaaacactaaatttagaactgccttaattcaaccataatttagaataagctcaaattccatgagaatgcaggaatgagtattagatcaaaggagtcagagtaagcagtcatgtccctttacgttttctccgacttcctgcctcaaacatacatgagaagcctagagatgcaacgggtatcttgaaaccgtgaatcaagccacaagtttatgactgtagcaccaaaggcaaaagcctgatcctcaattatgtcaatgagccaactgcctcactctggacttgtgacgtgaggagaaagaaatcccacgtgttaaacccactgttaatgatgttttctgttattgtgacttacagaattttctgacagatactaacagaatttctcatagttagtaaaagggttttcctttacttgttctgacttgtacccatctacttggttacagtgactacaccgtaagtggacacttcaatcaagaaaggcctatcagagtcttcctctagactaacctatggtctgagggaaaaaaaaaaaa

SEQ ID NO: 59287 - DNA, 2217 bp, Homo Sapiens
agaaaagcccgttccttattaaccaaaaggtaagatggccattgttaggcattttaaagccccataaactcaacagtgattgaaaaactccagaggggacatgtagctttttacccacctgagcatagaccaaatttacaactgttgctgtttatttcagctcttatatttttgtatgtaggagttctcaaatgccagactgttatttttaattagtgtttaaaagactttgctatatatagtcattaggctgtgttttaatcagggtggagtaccaccaaacctccaggaccctgtgatgggcatggacagaccagaggggaggatcagagcaggcaccgggcacctgtcacttgatgtccggaaaccatgaggtggcccccttccgtttagcataaaacatgtcctgttcttgcagctcaacttagttgttatatataacctcttagaacctttgagaagaacggctgtgggtgctaaggccagtgttgaattaggtggctggttcagaaacacctgcccaggctaacggggcagatctctatacagcgcaggggtgcttgggacctggtgggggcagatttctttaccttctgtgcccctatatttttgagataacgcagaaaggcttcccttgctctacatgtgaccgagatgcatatgtaaagctgcctttccagaagggtaagcttgctgcctccagctgttcctgctcctcatggcaaagtgcactgaggagttttgttggctgagcagcgtgttcgggatgtagcggctgcaagtgagaagcctattccatggttgctttagctcctgggctgccatcccggtctgtccctccctcttttcatgtggatgggccggtacaggcccacccacacagagaaggaagaaaggagggacgagattactattaaccattctttctatgtgtggtgcttctgtgtatgggctgtgttcacagagcatctgatctgttggtctgattttctgagtgtagcactgagtctgctgcggctgcttgccaagggcttgaatgtcgaggggttgtggggccagggttctgaatactatctcaggttatgcacaccctgcctgccctccatgtgcctgcatcacgtgatgtgaagacccaggtgtatgctcttcatggaggcaatgcccccgtgttcagaatgtgaaaggaaaagtgctcaaggacagacagagttgagagcatgggtggagtaggcaaaccatcccaggctacctcctgccttgccacccctctgcagggcgggcacaggctgcgctccttgatgctccttggcctggagagtgaagctgacctcaaagtcagccatcttgtatgtagcaggcctcaggactatgggcgggtgtgggccactgcagccagcacggaaaatgagccgaagggaaatccgttccacagaagcaccttgtctttctgcagtttttgagtatatttctcaaatagccataaaagtttaaaaaatatatttgacagctaactctgggaacaaaacatgttatctaagatccctttttaagtaacacatttcctgcctgccttagcaggtctcttaagctgtaaaaatagctacccatggcagtgagatgaggatccctggaccttgcctttctgacctctttcccccaggaagtccatgactgaccttcaggcagcagcatctctgcaggctccactgagcgctttcagatctccgcagactccactgagcgcttttagatctccgcagactccactgagcgctttcagatctctgcagactccactgagcgctttcagactggggccatgcctcaggggatgggctccccctgtgttgttttgctggtggccacgaatccgaaaggcccatgctgcagcgtgccctgctttgagtttggttgatatgcttaataagaacattagttttctgggagaatttggtagcacccgttcttcccttcactgtgtgggggaaatagtgttgattgaaaggaagaggactccgagattggattggagcaagaaagtgtgggtatcgtgtgttgtgactgtgtcttctccggggtgctgcttcactggaggtctcccttcagggtctggccctcatgcctggccccaggtgctcgtgtgcacgtgagcggctcttcctgctgactgactacagctaattgacaaaaggcagtttcaaaaaaaaaaaaaaaaaa

SEQ ID NO: 59288 - DNA, 1713 bp, Homo Sapiens
ggcctttttttttttttttttttctggagacggactctcgctctgttgccaggctgaagtgcagtcatgtgatctcagctcactgcaacctccgcctcccgggttcaagcaattctcctgcctcagcctcttgagtaactgggattacaggcgtgcgccaccacgcccggctaattgttttatttttagtagagatggggtttcaccatgttggccaggatggtctcaaactcctgaccttgtgatccgcccacctcggcctcccaaagtgctgggattacaggcgtgagccaccgtgcctggcctctccaccttttttgcatctgtcaatgcccctagctctctagcagcagctgtgcaaacaccaggagggcccaaaggggtcttggtaagacacttttcagggcactgcggcagtgctatggtcccgtggtcaggagacctgcagcctgtcagtaactgacagtgtgaccttgagcaagatcaactctatggcttgcctcctcttatcaaatggcacaactatttcagcttagaaggttgttgtgaggttacaatgaaaaagcataatgactttttaaaaaatgactcaacttgataaaaatacaaaatactgcctttattcaaaatgaggcagagatgaataaggagggaattttgtcccagttaaatatttattccatttaaactactcaaagtccagttgccccaataattaataattttcacttccccaaaccaccaagcaaggtgcactgtcattctcacctgcgggacctatgtttcccattccgatgcctttattcaggtgattggcatcaatgggttgccctcctggtcctaaccccatgccaataccaccaaggccatctggaaagaaaagagaaagaagcttagttttcccctatttagcaaaccttgaccctcaaaggaaaagagtgtttagtgagttgcagctatccacttcagcctacccacccccacccaccagtgacctcagggcccaatgcaaaattcaacatcggcacacttggaaacagagccttgttccggcgtttgggatatgtgtgtatacaacaaaggcggctgaaaaccaacacgggaaagttaacaacccccacactaagattcttgagagcctatttgtttcactaacccatggactgagaactgtctgatcaaaaaaggtgactcaagacatcaggtggcaagcagcacaaatgtgcccaatccctagtagcccaaaggatgtttctcatgaaaaaacacgttacaaaccagccaatcaacatcctgggtgtccactactctctgaatctgggtggttttagtaacaatgaagctaatgtatgtattcaaagaacctatcttccttcccccaaagcttcccaacccacaactggatacccagcccacactcaactccatgccctaccaacacagacagggacacagaaatacaggctggtctctggaaacagccaaaagagctgacacttgcaatatctggggtaaccaccatctgaggcttaaactacaaccaggtaagcttttaaaaatcgtaacaagggcaggcgcagtggctcacgcctgaaatcccagctacttgggaggctgaggcacaagaatggcttgaacctgggagtcaggcattgcagggagccgagatcgcaccagtgcactccagcctgggcaagagtgagactttgtctc

SEQ ID NO: 59289 - DNA, 583 bp, Homo Sapiens
  misc_feature (494)..(494): n is a, c, g, or t
  misc_feature (518)..(518): n is a, c, g, or t
  misc_feature (543)..(543): n is a, c, g, or t
  misc_feature (545)..(545): n is a, c, g, or t
  misc_feature (561)..(561): n is a, c, g, or t
  misc_feature (581)..(581): n is a, c, g, or t
agctaatgagaaatgccacacagtgtcttcaatattgtttacaactgcaaattgccttcatgaaaataatttaattgctcctgagaggcctgatagatgtccctgaattctgtccagccatgccatgactgacagaacagagaaaccaggaaaaggtcacacacggtttgagaaaccatcaaaatgtggtgtccatctcctggccaagacaggaatttacagcaccattgtggtgttcaaaaactgtcagaaaccttaggaattgtcacagttaccacaactacacattccagcaaagaggaatggaagacagaggcaacatgaaccaggagggtagaaggtctgtcccccagcactgaagcaggcacaaaggcataacgtgaaacactcatggagaataaacaaacagtttaaattgcacaattaaactataaaattcaacactgactgcaaactggcttttaaaatgtgtagacctatcaccctactatggnttatctcttttaccaaaaatctgncaggttcaactattttggtacatangnatttcttccctttggnaggcagacttaactattttnta

SEQ ID NO: 59290 - DNA, 762 bp, Homo Sapiens
atggaggtgcagctggtggagtctggaggaggcttgatccagcctggggggtccctgagactctcctgtgcagcctctgggttcaccgtcagtagcaactacatgagctgggtccgccaggctccagggaaggggctggagtgggtctcagttatttatagcggtggtagcacatactacgcagactccgtgaagggccgattcaccatctccagagacaattccaagaacacgctgtatcttcaaatgaacagcctgagagccgaggacacggccgtattactgtgcaagagagacttgtgtgattggggccaaggtaccctggtcaccgtgtcgagaggtggcggtggctcgggcggtggtgggtcgggtggcggcggatcttctgagctgactcaggaccctgctgtgtctgtggccttgggacagacagtcaggatcacatgccaaggagacagcctcagaagctattatgcaagctggtaccagcagaagccaggacaggcccctgtacttgtcatctatggtaaaaacaaccggccctcagggatcccagaccgattctctggctccagctcaggaaacacagcttccttgaccatcactggggctcaggcggaagatgaggctgactattactgtaactcccgggacagcagtggtaaccatgtggtattcggcggagggaccaagctgaccgtcctaggtgcggccgcagaacaaaaactcatctcagaagaggatctgaatggggccgcatag

SEQ ID NO: 59291 - DNA, 553 bp, Homo Sapiens
  misc_feature (382)..(382): n is a, c, g, or t
  misc_feature (435)..(435): n is a, c, g, or t
  misc_feature (509)..(509): n is a, c, g, or t
  misc_feature (540)..(540): n is a, c, g, or t
gctaaaataattaaggtcatcacatttcctttccagtctatttcaacctaattccatcaatttttgttttcatgacttatattagttgattctaataggggtgcaatattctctgcacagaacccaaatgcaggacaggctattatgttctgcatgccagtcaaattaccaggcattctttttcttaacatttatttcagtttcaggggtatgtgcacaggttgtttttatacataaattacatgtcatgggggtttggtgtgcatattattttgtcagccagataataagcatagtacctaacaggttgtttttcaatccttagcttcctcccacccacctccctcaagtatgccctggtgtatattggtctcttctttgngtccatgtgaattcaatgtttagctcccacttacaagtgagaatatgtagtgnttcattttctggtcctgaattaagttaattttcttagaataatggcctccatcttcatccatggtgctgcaaanggatagaatctcaatctttttaaggctgggnagaattccatgaa

SEQ ID NO: 59292 - DNA, 571 bp, Homo Sapiens
  misc_feature (495)..(495): n is a, c, g, or t
  misc_feature (535)..(535): n is a, c, g, or t
  misc_feature (545)..(545): n is a, c, g, or t
  misc_feature (555)..(555): n is a, c, g, or t
  misc_feature (560)..(560): n is a, c, g, or t
  misc_feature (570)..(570): n is a, c, g, or t
gagatggagtctcgctctgtcacccaggctagagtgcggtggcgcgatctcggctcactgccagctccgcctcccaggttcatgccattctcctgcctcagcctcctgagtagctgggactacaggcgcccgccaccatgcccagctaattttttgtagttttagtagagacagggtttcaccgtgttagccaggatggtctcaatctcgacctcatgatctgcccgcctcggcctcccaaagtactgggattataaggtgtgagccaccacgcctggccaataaaagcattttaaaataccaaatattttaaaataccaaataatcaaaaagtagttgtcaacactggccaaactgccaaagatgttaacattagaggaggcttgaagaagaaagaaggagggaggaataaaaaccaaggagggagaagagctacattaaaaagagagagagatgtgaaatgaatccacaacgtcatcatctaagcaacaaggnacctcttcatcctggattctggcacctatatcatatttcnttaaaatggnatgaatcaanttttncaaatggcang

SEQ ID NO: 59293 - DNA, 1734 bp, Homo Sapiens
aattaaaatatccagttagtctttattttcaagttcaaaaccttattgcgtactgaaaatgcatgaactactggacacttttacaagcttactttcacaggagtctggtaagatacgtgctattctcatatttttctcactagagggaaaacataaggcatagagagagaggcttgctgagtctggcccagatcaggcgcgttcattcggccgacccttgtgctggctgtaccctgcactgtgatgctctctctgcctcccacatggctgccagagtcgcctttctgagatacagatactgtcatatttcaacttaaaaccatcactgtctccaccatggaataaaggccgctgtctggagcatgcattctcggccttgggcagggccccagcgtcctcctccggagttgggagctgctggccctgcaccgtgccggccctgggctgcccctgctgcttgcccttggagtcctgccctgctcaggctcagcactcagctgcctctgcagatgccctcctcaggggccctactctcctggccacttcactgaagaattggccatttcccgccttgtctgcaatgctttattctcagccctgtgagcctctgccagggcctggctgacaatgcttgcatctggcccctagcatctctcacagcgtcttgaaccccggtgctcaactgcctgagattgaactcagtcaaaccaactcagcctcaaatccaagtgtccagcttctttatgggaaaagcaaaaccactggttctgtggggacacatattctctgcagatacagtggatggttcgaggtctaagggcatgcgaggcctccgtgctgctctccctttagtggatgccagccacctgctgtagctggagcccagggtgggcaatggctggccactgcctgacttgcagacctcccaaggtatcctcaccatcccaaggtcatgacaacctcgcacacttctgcccaggcctaagcaggaggggggcctgtgtgggagagagggcctagcacctcactcatcagagctgtgtacatgaccacactgctgtgcttcagggaggcccagtggctggatgttgagctttgcagacaccagtcaagaatgatgggtagttgggcgcgacaggagaggattcagaatttgccatccaaagccctgtgagacacaagactaaggcccagtgcctggtgcagttctgcctttgacattgtgaggggcgcaccttgggaacttggagcacagggatcttccctggaaatagtctcaggtgtcacttgtcaccctgcattgggacttcatgagactgtgaataactacagtaaaccagatgtgcaagaagccagagtctaggttatagttacttcagactctgtatttaaagattctctcttttttttcttttttttttttttgagacagagtcttgctctgttgcccaggctggagtgcagtggtgcgatctcggctcactttaagctccacctcctgggttcacgccattctcctcaactggaggattctacgcctcccaagtagctgggaatgcaggcgcccaccaccacgccaggctaactttttgtatttttagtagagatggggtttcaccgtgttagccaggatggtcttaatctcctgacctcatgataccccggcctcagcctcccaaagtgctgggattacaggcgtgagccaccgcgcctagcccaaaagttctcttaatt

SEQ ID NO: 59294 - DNA, 1468 bp, Homo Sapiens
aaagtgcaattagaggtttaaatctaaccaaggggtctcatgttcccagatccagaagccgggaggaaattatgtgaatgtttccaaaaaaagtcaatacaggccaaattaagtgtcagactcaagaattgctgtaagccccccatggggacacagattctgcgtgggataaacactgtcctcttagaaccttaggaatttggggttttgttgtttttcccccctcgatttcttcatcctttcatagattctttctgtctgtaatcagctagttttagaaaacatcttttcatctatctactgtggctcacaaactaatttacaagtgcatttgactgcttcttgtaagaacgcgtggaaccaaaggtatctcattgtgttccctcagatcacacaaataacacactacctccgtactgctttcaaccaaggaggcagcacagaccataccgtgtccctcggcgctctgccctagctcatttggaacagagatgtttttctcagcctgcctgtttatttgaagttacacttgctctgattttctaatcaaaagatttcggagaattcatactcaccatctcccagaaattaaaagcttgccctggaggctgagcaaaacacaggaaattgatgaggataggagcaaagatccaggtagcttgcaatgatgggcttgggaagaggccaattaacctgtctctcttttgagcattcacgtacttgattttctccttgtggatctggaactgagaaaagccccctgggtgtgaagtgagaaaatctattaattccctttgattagcagtgaaacccccactctcggacagggcaggcaagatggaagcagctacagatagacagctgttctgtaggaggaaaatgctatgggcaggcaagttcaaggccattgtctagtcctggaggacatggaaccagtttgtctggggtacaagaaccttcctagtcaacgctcatggagatgaagtgagtaaattttgaccccaagtttcatgactgattcttgtttgggaataaatttctgaagacatactttaggttcaaggaaataaaaaatcactaactctaatgaggcacctaccagccaaagaacccagagagagccgggagagctgaccttagactgtcaggccgtttctttttaaaataagcgctacttcaggaggagaaaaccaaacaacacatgttcttacttataactgggagctgaatgatgagaacacatggatgcattgcagggaacaacacacactgggacttgtcggtagcggggtatgtgggaggacggagagcatcaggaaaaatagctaatggatgctgggcttaataccaaggtgatgggatgatctgtgcagtaaaccaccttggcacacagttacctgtgtaacaaacctatacatcctgcacaggtaccctgaaacttaaaggttgaagaaaaaaaaaaaaaaaa

SEQ ID NO: 59295 - DNA, 2266 bp, Homo Sapiens
aagagatgaatttctgttgtttctaagtcacctacctacattatggtattttgctagaacagctcaaacgaactaagacatatataatggacttatgtaatccatcgcctattactaggtattttgatttatagtttatttgtcctctgttatatcagcactgctgtgaacttcatctgtaccaaaatatttccatacagtctcaatgacttgtttgggataattttttgaataatatcaaagtgtgacatttgaataagagaagaggcacagtgttccaagagctagaaggtgaaggtaagccttgcttccatcctgcgatgtagcttcgtgtctgtgaatagcaagcaacttcagatgaataagctatcaacatactggaactcggtggtgcagcttccttgtggggatgactcttaggaatcatccggattttctgaagaaaacaaatcatttgggttctggccttcattgccctgcccagcgggagtccccgaagggctgtgctagaatttcagagcatggttggcacagcgttggtgaaggttacaggattgtctagacaaaagggcccaggggaggcacagaggctctgttagtgggtggaagggatgatgctgtgtgtatgtattgagccacaccctggatttcagtaggagccagaataattctgaggcttgggtgtgggcagctgtgctaaacagggaactcagggtggtttcaagccagtacagagctaggacctgggatctaagattggagcagacacacatggagaagcagatagcggaatcaggatcagctgtctgagtgggaaggtcttagagaacccttgctaggtgttcaccaggaagatgcccacacctgtacactggatgggggtgcatgttcctgggccaggagggaccacgctgggtgttctgcttgctgagacagtggtttgggtggaggttcccattcctggaatgcctagaactttgctgcttggcccagtatgttctgggctcccccatttaaggcaactatgaccactttcattgccaccacctcctcctagcttgaaacaacctcccctgctttgctctatctgtgccacaattaaggagcttcccattttcttcattatattgcgggtagttatatgtgtatcttaggaaaagtagtatggtgtgaggaaagcacccaaggactttgagtccactgcctcttcacttaatgttctggctcctccaattgctgcatcacccttgggtaagctaattaacttctctgagcctgagcatccgcatttattaaacagggatcagatacttacctcgcagggtggttgtaaggattagaagtaatgacatataaagcacccctcccacaatttagtgtctggccagatggtgggtgttgagattgtccgttattactgaggacttaatgtggtctagtctgtaagggttgacagatcattgtggcagatcccagacatgcttattatgttagcagtaggggccctgaggtcaaaaggcttaggacagctatcctgcctcccagacctgggaggaaaagagagagaaagaggggctccagggcagttgtcagagttaggaaggtgctgagtcgccacaggcatcagaggaggattttctgaatgggtacagtgaggacccagtggtgctctctcctcaaacctacctgttgggaaccagatcagcccagcaggctggtagcagagccatggcctgggaacctgggtcagcctcactgtcttagctccagactcacccactccctttgcaatgctgtgctgtgtagtggtaaagcctgcacacgctaggtcccattcctgcgccattcttcctgcttgtgtgacctcaggcaagccccaaacagccttgtgactcaatgttctcatctgtacaatagggattatggcacctatcgcatagggtccttgtgaggatcaaatgtttatttatgaaaagcatttagagactgggcacggtggctcacgcctgtaatcccagcactttcggaggctgagtcaggtggatcacttgaggttaggagtttaagaccagcctgaccaacattgtgaaaccctgtctctggccaggtgtggtggcacgcacctgtagtcccagctatttgggaggctgagtcaggagaatcacttgaacccgggaggccaaggttgcagtgagccgagatcgcaccattgcactccagcctgggtgacgaaagcaaaactccatctcaaaaaaaaaaaaaaaaa

SEQ ID NO: 59296 - DNA, 1339 bp, Homo Sapiens
aaacagctaccattttaatgttttggtactgggaaatgtgttagttgaaaatttcacttacgagtaatccttttatttctctatggtaacaagacaggtaaggcatatcagttggcccagactcattggtcctcaatgactgactgccggactcagagttgagggtctgatctcagaggacgcaggttgtgttgccagcccagatacctatgacaccctttcctagcaagtggacgctgttttctgaaatatctgtcactaccttgaggcaatcctcattattttaatctttattcttaggctaatgtcttgagccatgtatcagagagagacaggcaggttgttgatttttgagatgaagaacaactatctggccagggagagaaagagaaaatcggcttataagttagaatggtacagagtgctctgccttctcagattattttgtttccaagaatcactgattatatagctttttttttttaagtttaagcccatacccattctgcatatttcagagtgaaatgtcctttcgggacaatcttattaaatcactaatctgaaattttatgttccctagttggccatgccagtattttggttagggttttaggtgatttttatatccactgtaaacttggatataacttaccattaaccagatacttaaaaccagggtattttcctaaggtttaacattggaagtggtatgtgagctgagccttgaagggtgacaccaagttttttgacacgaaaaggttggatgagctagctaaagggcttgttttttatcctgtagggcaggagtggttgtagatgccctctcatgtgctgacatactgattgatggtggcttctaaggtctctcctgagtctagtaggaggcaggcttcctaactgtcatggacaccaggcaggcaggtaggggaatgaagcaagatttggcagcgcagctgctgtgagtttgctctccagtggcttggaaatgggaagtaaaggattctgatcttatgtgagaccattttcagactgtcctagtctgccctcacatatccctggaatggacacatacaggctggtcagggctttcttggggcactgaggtgggagaagctggaggcctgggcagggtagtggaactgagagtgagaagccccctacacttggatctcttgcgtatcacacgagactcatttattgatgactgcctagctggctcataatactgatggctgaatgggggtatgaaaactggtcctcaagagtatccagtcttattggaggaataatgcaaaaacaaacaaacaaaaaaggataaaataaaaaaaaaaaaaaaaaa

SEQ ID NO: 59297 - DNA, 3242 bp, Homo Sapiens
aaatccttattttcctgaaaggagtaaagccaaaggaaactttttttacatttaaaaaaaaaggtttttttcaaatgtaaaatttgaaaaaattgtggccgtaaaatacagccacaggcacgtatctcgttttctgagtgactgcatcccacctttcaactgcttaagctttattatcattactagttttggaaaatttaaatttgcttgtaatgtaactgctacagttacctgttagtttatttctcatcttatattctaaacatacagtatgtctcatactgcaaaacaaaggaatctgaagaagaggaaaactaaaaagctcagaaactgttatgaagttttgctgccacgttgtatgaggaatttgatttgcaagtttttaaactaacacacttaaaagctctttattcttcacatatatatacataggtttccatagttggaatctcatatataagttattatgtatccattttttatatataacataagcattttttgagtcactgagtaacgcagttgtccttctgctaactcctggctgaagttactaatgggctgggattttcatttattcttctagtaattcaacaaatacttgttcagagcctgtcgagtgtcaagcattgtttcagtcactgttcatgtgcaaagagtagagcaggggacaagtcaggccaactcccagctctcatggaggtataatagagactgagggaagatgttaaacaagtaaacataagcaagaaaatttcaggtagcaacaagtgctgtggagataacacatggatatggatcaacaggtactcttacatactactggtgacatataaattattaagtaaaatgaaaagcaaatatatcctatgaccctgaagttttaccctatttcatgtacatataagccagatgcacctaaaagaacattcatagcagtgttattttcaatagttcaaaactggaaacaacaaaatgtccatcaacagtagaatggctcaatactttgtagtatagtcatacaatacagcaacaaaagccagtgtactacactcaatgtgaatgactcgtaaaaacatattgttgagggaaggaaagcagacacagaagaataccttctatgtatgtaaaatccaaaactaaggtatgtagtttaggactatgtgcgtagtaaaattacttttaaaaaacaaaaaacaggccaggcacagtggcttatgcctgtaatcccagcactttgggaggccaaggtgggtggatcacctgaggttgggagttcgagaccagcctgaccaacgtggagaaaccaaatctctactaaaacattagccaggcatggtggcgcatgcctgtaatcccagctacttgagaggctaagggaggagaatcacttgaacccaggaggcggaggttgcaatgagccgagatgatgccattgcgccctagcctgggcaacaagagcaagaaaaaaaaaaagacaaagaagcaactaccataaaatcagaataggactccctgtgggggcgagagggaggaagttgtgattagaaagggaagtatgggggaggtgcttctggagttctggtaattttttatttcttgaccttcatggtggttatgtaggtatttataataattcactaaactgcacatttatgttttagacactttcatttgtgttttatatttcaaacaaaagcagtgtgatgatagcattaagtatagttttagtgcatgtgcgcgcacatgagtgtatgtgtatattttacagctttattgaggtatgattgacatacaataaactatgcatttaaagtactcagcttggccgggcatggtggctcatgcctgtaatcccagcattttgggaggccaaggtgggtggatctcctcaggtcaggagtttgaggccagcctgaccaatatagtgaaaccgcatctctactaaaaatacaaaattagctaggtgtggtggcgcatgcctgtaatcccagctacttgggaggctggagcaggagaatcgcttgaacccaggaggcagaggttgcagtgagctgagattgcaccattgcactccagcctgggcaacaagagtgaaactcctttctaaataaataaataaataaaataaagtattcaacttgaacacttatggcatatgtattaacccatgaagccatcaccacaatcaagacagtgaatgtgtccaccacccctaagtttcctcaatgtccctttttcatctttccctcctgcctgctccttcttatcccctcacccccgggcaaccactgatctgttttctgtcactacagctgtacatagattagcttgtatattctagaatttaatagaaatagaatcacataatgtatattcttaattttgtctggtttctttcactcagcataacttttcgagattcatccatggtgatgcttgtatctgtgattcattcctttttattgctgagttgttgtctcttgtgtgcatttgccacaatttgtttatccattcacctgttgatgaatattttggtagttttcagtttctggctattacaaataaagttgctgtaaatattcacatacaaatccatttataaacacatatgatttcttttctcttggttgaatacttgggaataaaatggctggatcatatgatagatacatgtttaactactttaaaaatataagtatagttttgtaaccctgtatcttcagttaatatgaaaatattttcaagtcaataaatacattcctataaaattattttttaactgttatagtagtccatcaattaaacatgccataatgtatttaaccaattctttgttgatggacatttagattacttccagttttttcactattataaacagcattaccatgaatatccttgaaactaaatctttgaacatgttcttaattatttctttaagataaattactagaaatgagattgcctggccaaagttttattacagatttccctccagacatatgacagattaaatcatcaatcagattttttttatttgagtactagatttagatacagttagccaaaataccccttttttccagactgggcaacatggcgaaatcccacatctacaaaaaatacaaaaaatacgccaggcatgttggcattgagactgcagtggccatagtcacatcactgcactctagcctgggtggcagagggagaccccatctcgaaaaaaaaaaaaaaaaaaa

SEQ ID NO: 59298 - DNA, 1608 bp, Homo Sapiens
atggatctcatcccaaacttggccgtggaaacctggcttctcctggctgtcagcctgatactcctctatctatatggaacccgtacacatggactttttaagaagcttggaattccagggcccacacctctgccttttttgggaaatgctttgtccttccgtaagggctattggacgtttgacatggaatgttataaaaagtatagaaaagtctggggtatttatgactgtcaacagcctatgctggctatcacagatcccgacatgatcaaaacagtgctagtgaaagaatgttattctgtcttcacaaaccggaggcctttcgggccagtgggatttatgaaaaatgccatctctatagctgaggatgaagaatggaagagaatacgatcattgctgtctccaacattcaccagcggaaaactcaaggagatggtccctatcattgcccagtatggagatgtgttggtgagaaatctgaggcgggaagcagagacaggcaagcctgtcaccttgaaacacgtctttggggcctacagcatggatgtgatcactagcacatcatttggagtgagcatcgactctctcaacaatccacaagacccctttgtggaaaacaccaagaagcttttaagatttaatccattagatccattcgttctctcaataaaagtctttccattccttaccccaattcttgaagcattaaatatcactgtgtttccaagaaaagttataagttttctaacaaaatctgtaaaacagataaaagaaggtcgcctcaaagagacacaaaagcaccgagtggatttccttcagctgatgattgactctcagaattcaaaagactctgagacccacaaagctctgtctgatctggagctcatggcccaatcaattatctttatttttgctggctatgaaaccacgagcagtgttctctccttcattatatatgaactggccactcaccctgatgtccagcagaaagtgcagaaggaaattgatacagttttacccaataaggcaccacccacctatgatactgtgctacagttggagtatcttgacatggtggtgaatgaaacactcagattattcccagttgctatgagacttgagagggtctgcaaaaaagatgttgaaatcaatgggatgtttattcccaaaggggtggtggtgatgattccaagctatgttcttcatcatgacccaaagtactggacagagcctgagaagttcctccctgaaaggttcagtaaaaagaacaaggacaacatagatccttacatatacacaccctttggaagtggacccagaaactgcattggcatgaggtttgctctcgtgaacatgaaacttgctctagtcagagtccttcagaacttctccttcaaaccttgtaaagaaacacagatccccctgaaattacgctttggaggacttcttctaacagaaaaacccattgttctaaaggctgagtcaagggatgagacctttgtagatatggagcccattcacatggactttttaagaagcttggcattccagggcccacacctctgctttttttgggaactactttgtcctaccatcagatcccgctga

SEQ ID NO: 59299 - DNA, 2261 bp, Homo Sapiens
tatatcttagtcctatgacttcctttgcctctccacatatacacagagggaaattatttaatatttaatccaaactgctcaattttctttttctttttctttctttttttttttttttgagacagagtctcgctctgtcgcccaggctggagtgcaatggtgcgatctccgctcaccacagcctccctagtagctgggactacaggcgcatgccccaacacccagctaagttttgtaattttagtagagacgggtttcactatgttggccaggatggtcatggtctgctgacctcgtgatccacccgcctcgacctcccaaagttcaattttcttaaaagtgaccaccaacaccatcaacatatgtttatagactagatgtatcacttgtttacccaaattgtagcataaatatctgtttttagaaagcttttccataagtctttctatatgattggattattaagcaaggctatgattaggaaataaaccactttcccctttagctagttctaatgaaagctttccaaattaaacactgtgtttgaacacttcttccattcatagcatgtgctcatcaaaaagtgctttccgtttctggtatgtcaactgtactatttataacctagttaacaaagccaacatggtgaaaccttatctctactaaaagtgcaaaaattagccaggcatcatggcacatgcctgtaatcccagctacccaggaggctgaggcaagagaattgcttgaacctgggaggtggaggttgcggtgagccgagattgtgccactgcatccagcctgggtgtcagagtgaggctgtctcagaaaaaaaaaaggggaggggggggtggttccaagatggccgaataagaacagctccagtctacagctcccagcgtgagcgatgcagaagacgggtgatttctgcatttccaactgaggtaccgggttcatctcactggggcttgtcagacagtgggtgcagtgcaccgagcgtgagctgaagcagggtgcggcattgccttacccaggaagtgcaaggggtcagggaattccctttccaagccaagcgaagctgtgacagatggcaactggaaaatcaggtcactcccaccctaatcctgcacttttccagtggtcttagcaaacggcacactaggagattatatcccgtgcctggctcagaggatcccacgcccttggaacctcgctcattgctagcacagcagtctgagattgaactgcaaggcagcaacaaggctggtggaggggcgcccaccattgctgaggcttgagtaggtaaacaaagcagcgggaagctccaactgggtgaagcccaccgctgctcaaggagacctgcctgcctctgtagactccacctctggcggcagggcatagccaaacaaaaggcagcagaaacctctggagacttaaatgtccctgtctgacagctttgaagagagtagtggttctcccagcacagagttggagatctgagaatggacagactgcctcctcaagtgggtccctgacccccaagtagcctaactgggaggcatcccccagtaggggcagactgacacctcacacggccgggtacccctctgagacgaggcttccagaggaacaaccaggcagcaacatttgctgttcaccaatattcgctgttctgcaacctctgctgctgatacccaggcaaacagggtctggagtggacctccagcaaactccaacagacctgcagctgagggtcctgactgttagaaggaaaactaacaaacagaaaggacatccacaccaaaaccccacctgtacatcaccatcatcaaagaccaaatgtagataaaaccacaaagatggggaaaaaacagagcagaaaagctgaaaattctaaaaatcagagcgcctctccccctccaaaggaatgcatctcctcgtcagcaatggaacaacgctggatggagaatgactttgacgagttgagagaagaaggcttcagatgatcagacttctccgagctaaaggaggaagcttgaacgcatcacaaagaagctaaaaaccttgaaaaaagattagacgaatggctaactagaataaccagtgtagagaagtccttaaatgacctgatggagctgaaaaccatggcacaagaactacgtgacgaatgcacaagcttcagtagccgactcgatcaagtggaagaaagggtatcaagtgattgaagatcaaatgaatgaaatgaagcgagaaaagaagtttag

SEQ ID NO: 59300 - DNA, 400 bp, Homo Sapiens
atcttgggcaagcgatctctgagcagatgcctttaccgtcatgggggcctgatgtaaagtgtatacctcccaggggagttatgaggattaaaaacaataatcctcccaaagtgcttggaaagtacttcatccaaagtgagcgctcttcatgccattgcagttgttgggatttttgaggagtgtgcaaccaaggagttggaaaagttcaagggaggccaggcgtggtggctcacacccgtaaatcccagctacttgggaggctgaggcaggagaatcgcttgaacccaggaggtggaggttgcagtgagccaagattgtgccactgcacttcagcctggacaaaaagagtcagactccatctcaaggaaaaaaaaaaaaaaaagggcaggggatttgatag

SEQ ID NO: 59301 - DNA, 1062 bp, Homo Sapiens
atgggtatctttcccggaataatcctaatttttctaagggtgaagtttgcaacggcggccgtgattcaccagaaaagtaccactgtaagtcatgagatgtctggtctgaattggaaaccctttgtatatggcggccttgcctctatcgtggctgagtttgggactttccctgtggaccttaccaaaacacgacttcaggttcaaggccaaagcattgatgcccgtttcaaagagataaaatatagagggatgttccatgcgctgtttcgcatctgtaaagaggaaggtgtattggctctctattcaggaattgctcctgcgttgctaagacaagcatcatatggcaccattaaaattgggatttaccaaagcttgaagcgcttattcgtagaacgtttagaagatgaaactcttttaattaatatgatctgtggggtagtgtcaggagtgatatcttccactatagccaatcccaccgatgttctaaagattcgaatgcaggctcaaggaagcttgttccaagggagcatgattggaagctttatcgatatataccaacaagaaggcaccaggggtctgtggaggtgcttatgttcaaaagctgttaccggctgtgtgctgtggctcatgcctgtaatcccagcactttgggaggccaacgcgggtggatcacttgagggtgtggttccaactgctcagcgtgctgccatcgttgtaggagtagagctaccagtctatgatattactaagaagcatttaatattgtcaggaatgatgggcgatacaattttaactcacttcgtttccagctttacatgtggtttggctggggctctggcctccaacccggttgatgtggttcgaactcgcatgatgaaccagagggcaatcgtgggacatgtggatctctataagggcactgttgatggtattttaaagatgtggaaacatgagggcttttttgcactctataaaggattttggccaaactggcttcggcttggaccctggaacatcattttttttattacatacgagcagctaaagaggcttcaaatctaa

SEQ ID NO: 59302 - DNA, 3230 bp, Homo Sapiens
tggcctactggtaactgtgctcatattaatcttagttatgaaacagatcatttagaaggtaacattggaaacaaaaggctaaactcagatacataatttgccaggcctcataaactgtgctttgatgttctaacaacttcccaatagaagccatctgttaaacaagcaattcattcagagtggaggtattaacattaaactgtctttcatatagttagtcattagttattatactatctgtctctcatatagtatagttagtaattactgaaaataagataatcctattaatggccacaacatgattctgatggttagtatattctctagccacaaaaacccagacctaggcctccccaattctgccattcacactgcagcatgtgccatctgtcctaagaggagacgacaggctctcctcttcctccatagatttcatttgaactgtgagaaccaagtttgccaaatgacatttgtgctagaggaagcactcacatgaggccaaccacccaaagcaatacaatatttaaccacatatttcagtgctggcattcgtacccacacaaatattaaccaatcaaaacttatagtctccttgccaaattctcagaagaatggctgaagaagtatcacatggtctgaatctatacaactttacccagattcctgtgtaattcaggggaattctctagttttgtttagtacgagtgagaaactcaaagaataagaaaattgttggggacaggcacagtggctcatgcctgtaatcccagcacattaggaggccagctggaggactgcttgagtccaggagttcgagacaagcctggccaacatagtgagaccccacctttacaaaagacaaaaataattagtaaggcctggtggcatgcatttgtagtcccaggtacttgagaggctgaggcaggaggatcacttgagcccaggagtttgagcctacagtgagctgtgatcacaccactgcactccagcctgggtgacagagcaagacctcatctttaaaaagtaaaaaaaagtcttgagggctatagtaagcacaagaaattatttccttaaactccttttttttcttcctacgctattaaaaaggaaaagatttggggaaaagagaaagggtgtgatataagcaaatgctctatatcggcaaatctctctgtaactttcaccactactatctctgtcaggcgagcataaagtgaaaatatttagctcaacatttgtgtaggaggatttgcgagggttccaaattttctccccacaattttgcaaaatccagttgccaataatcaggtaatttttacttgagtgctttagagcaaccccaaagactgaattttatttatctctgagtctctttagggggtgaaaaaacatcaacataaacaactgaaggaatatcacctggtaaaatcattgaccccacaccgggactgactccatgttccctccccaagccatattggctttctataacaaccttctgtcttttgtatgaagtaagatggattttgatccgttgatccccttatctttctttggtgtaacaactggaaaactggcaattcatgtgaagtactttgccaagaggatagtaaagatccttttaatgttttaagcatcctttgttgagttattgtgtgctggaatgggcctaaggtccattgtgtggttcatgttggagcctggatgggtacatctggtaaagacagcaaagaagttaaagggggaaatgttcctcaagacagattcttttctgtttttcagttcctgggcagttctttgtatttttccacacagggtgaaaaacacagtcataaaaccccgaacagtagaacagtcagaatgaaattagtttgttttcactgaagcatttgtgcttgtttccttcagaagctgatcttgatgacatgattgattgtccctgtggatccttcccctttatgctttccatatcccccaactgctcagagattgaccgcgtgccaatgcaggcagaagggacacgggttaaaagctgccaaggcgtactcgctgccctcagcccaacacagggaagcagtcctaggagcttgacttgacttcagggttcacagttgatatgtgcatctggtccggggagaaagagggaaactttccttcaacctgacccaaggctctaagctcacttgctgcctcactcttttcctctcataacacaaagttgtgccatgctgagtggagcctcctggctctgaaaccaatgtggtttgccatctagatcaatgcagacttcattgtgcactgaatgccagcaagagaggggcatctggtgtcatctcaaccatggaaagggtacattagccctgctaattgtcctcaccactatgccttaaaaatccccactcacccttcccaggtggctgcaaaggatcactcatattcactttgtgtctgatcctggtatttaatgccatttgtattcatcagactaatggaaatatcaattaagcccagtcaagactagctcttagagcaataatggacacttgtacctgagctcagagcagagggaagaaaggcatctggaggtaaatggtgaatgacggtcaagtgactatgaaacctgcaagtgaaccaataaagttaaagtattggtacaaatttgtacacatttatatagccttaccaggtatagtcatcagtgtacaggcaaatgatttttttttttttgcttgagtgcattagagaaagtccaaaaatgcagtcttataaatcttggaaaactgcaatttaaaataagctgtggaagatcacctagcctaataattgaaccaacactgggatctagccccaaattctatcactgtgagcacacaggctcactccaacataggcggaacctcggggaatgatttttaaatatcccattaccataaaatctctggtatttgaatctcactaattcaatctggtatttgatggatgcagcagggggtggccgagacattcataaagtttgaaggtactctttcttcattgtttcctagttttccttgaggaatcagatgatattttgcatagttcagagtgccctccaaaagaaaatcaacagtttaaggagttttctgcattactgagatgaagtaagcttacaagctttaacttgctgcatatgtctctcattaaagaatcttccaaccttcaaaaaaaaaaaaaaaaaaaaaaaaaaa

SEQ ID NO: 59303 - DNA, 789 bp, Homo Sapiens
atggcccaggtgcagctggtgcagtctggggctgaggtgaagaagcctggggcctcagtgaaggtttcctgcaaggcttctggatacaccttcactagctatgctatgcattgggtgcgccaggcccccggacaaaggcttgagtggatgggatggatcaacgctggcaatggtaacacaaaatattcacagaagttccagggcagagtcaccattaccagggacacatccgcgagcacagcctacatggagctgagcagcctgagatctgaagacacggccgtgtattactgtgcaaggttgacgcgtaataagtttaagtcgcgtggtcattggggccaaggtaccctggtcaccgtgtcgagaggtggcggtggctcgggcggtggtgggtcgggtggcggcggatcttctgagctgactcaggaccctgctgtgtctgtggccttgggacagacagtcaggatcacatgccaaggagacagcctcagaagctattatgcaagctggtaccagcagaagccaggacaggcccctgtacttgtcatctatggtaaaaacaaccggccctcagggatcccagaccgattctctggctccagctcaggaaacacagcttccttgaccatcactggggctcaggcggaagatgaggctgactattactgtaactcccgggacagcagtggtaaccatgtggtattcggcggagggaccaagctgaccgtcctaggtgcggccgcagaacaaaaactcatctcagaagaggatctgaatggggccgcatag

SEQ ID NO: 59304 - DNA, 762 bp, Homo Sapiens
atggggcacctctcagccccacttcacagagtgcgtgtaccctggcaggggcttctgctcacagcctcacttctaaccttctggaacccgcccaccactgcccagctcactactgaatccatgccattcaatgttgcagaggggaaggaggttcttctccttgtccacaatctgccccagcaactttttggctacagctggtacaaaggggaaagagtggatggcaaccgtcaaattgtaggatatgcaataggaactcaacaagctaccccagggcccgcaaacagcggtcgagagacaatataccccaatgcatccctgctgatccagaacgtcacccagaatgacacaggattctacaccctacaagtcataaagtcagatcttgtgaatgaagaagcaactggacagttccatgtataccataatgctctaccacaagaaaatggcctctcacctggggccattgctggcattgtgattggagtagtggccctggttgctctgatagcagtagccctggcatgttttctgcatttcgggaagaccggcagggcaagcgaccagcgtgatctcacagagcacaaaccctcagtctccaaccacactcaggaccactccaatgacccacctaacaagatgaatgaagttacttattctaccctgaactttgaagcccagcaacccacacaaccaacttcagcctccccatccctaacagccacagaaataatttattcagaagtaaaaaagcagtaatga

SEQ ID NO: 59305 - DNA, 915 bp, Homo Sapiens
atggatcccctgggcccggccaagccacagtggtcgtggcgctgctgtctgaccacgctgctgtttcagctgctgatggctgtgtgtttcttctcctatctgcgtgtgtctcaagacgatcccactgtgtaccctaatgggtcccgcttcccagacagcacagggacccccgcccactccatccccctgatcctgctgtggacgtggccttttaacaaacccatagctctgccccgctgctcagagatggtgcctggcacggctgactgcaacatcactgccgaccgcaaggtgtatccacaggcagacgcggtcatcgtgcaccaccgagaggtcatgtacaaccccagtgcccagctcccacgctccccgaggcggcaggggcagcgatggatctggttcagcatggagtccccaagccactgctggcagctgaaagccatggacggatacttcaatctcaccatgtcctaccgcagcgactccgacatcttcacgccctacggctggctggagccgtggtccggccagcctgcccacccaccgctcaacctctcggccaagaccgagctggtggcctgggcagtgtccaactgggggccaaactccgccagggtgcgctactaccagagcctgcaggcccatctcaaggtggacgtgtacggacgctcccacaagcccctgccccagggaaccatgatggagacgctgtcccggtacaagttctatctggccttcgagaactccttgcaccccgactacatcaccgagaagctgtggaggaacgccctggaggcctgggccgtgcccgtggtgctgggccccagcagaaggaacctcattttcctggggcctcacctgagtgggggcctcatctacctaaggactcgtttgcctgaagcttcacctgcctga

SEQ ID NO: 59306 - DNA, 2341 bp, Homo Sapiens
tcaatggataaataaacaaacaccaaaaaccagagtgcatttctccccccgagactcccttttgtatctggactgtgacatttcctcattttccagtttctggccctggaaagagctagcaaacagcacactccccaggtttggagaaaccttctgagccattgactatggatttgccaaggtttttgcactggggagttctggagaagctggcccccaaagtgaatttctgtaaagtaaatcctattttcccattgacttggcccacacttttggagatatgttcctgctgtcaaaggctggtgacaggtgggggaagagctggaactcccctgggtgtcagctgccccgagcttctactcattccaccttgagagcagactgatgctggccaggagcacaggagcttagagccagggggagatgcaacagcaggggaagagatttggcatctggtcccagaaacctctgctgccagtgggatgctctgctgctaggcttctgggatagcacactccgtctcctccagactgatctgtttctgttcatctgtccgtacatccttccttctcacaatcccaccctccctccttcatccatccatctgtccatccattcagcaatcatttttgaaagactctaggatgctaggggacatagagggaaattaaagagaatcaatgttctgatggcaaagaattatatcccagtagaggtgataggcaaggcctccttcctcctttttctccttctcctactccattgctttttcctcttcatcctcctctacctcttctttcttttctgctctttcttcttcttttcttcttccctcatcaatatcatgatcatagcagcctccaccgttaagtccccactaagtgccaggcaccatcctaggtgagattctgacatactctaatttatctcaacaaccctgcataatagtttctttttctttttttttttttatgagacggagtctcgttctgtcacccaggctggagtgcagtggcatgatcttggctcactgcaacctccacctcccaggttcaagcgattctcctgcctcagtctcctgagtagctgggatttcaggcgtgcaccaccacacccggctaattttttatatttttagtagagatggagtttcaccatgttggccaggctggtcttgaactcctgacttcaagtgatctgcccgcctcagcctcccaaagtgctgggattacaggtgtgggctaccatgcccagcccgtaatagttaataatgctcattttgcaggtaaaaaagcaggctctgagatgtttagtgatatacccaaggtcacactttttagtacatacttgtgtatgagatggaatgtgttgagtgcggaggggaaagtcctccagcctgtgccgtcaggatggcattatttagtaggtaggattttgatacatagtagatggaaagaagggcattcttagcagggggaacagcctaggcaaaggcctagaggctggaagggggtaggtttgtatgagccatggtgaaccaaagtgtgagaaagaaatggcaggagaggtttgagtccgttaagagaagccttgagtgatgagctatggctgacattggaagcagtaggaagccactgaaaggaatcaaaaggagggaaaggttcaggaagatggccatgaagcctggcatgggaggaggatccagagcagggagaggcaagctggaggccaggaggggctatatgggcctagcctccattaagccagaccctgggtgtggctatttctgcccagccagctactccagcagttgggagaggccaggacatagcccacatccttggtggatgggccacaatggcagggacaagggcagagtgaacgagttagggcagagcagctgcctgcctgccttctcccctcactgaagccccacagctcccagggggctcctccgcatcctgtcccaccctgcccacttcactccttgagccagggaatggttgccagtaccttgctgggcctcagctcttccatcgagcatggacaacccaagcagcaccctgagaaccatcccagaatatgcagagtgtcagagctggacatatggggaagctgaggcccagaaggggacagctagttgcctgaggacacacagagatagtggcacggctggaacttggggctagatctatagcataaaactccttccaagggagataagttggtgtctcccttttctagctgtggaggcttgaacatattttcttttcttttcttttttcctctcctgtctttgcctatgttttcttttctttaaaaaaaaaaaaaaaaaaaaaaa

SEQ ID NO: 59307 - DNA, 1487 bp, Homo Sapiens
cgaaacagtagaggtgacagagcagccgtgctcgaagcgttcctggagcccaagctctcctccacaggtgaagacagggccagcaggagacaccatggggcacctctcagccccacttcacagagtgcgtgtaccctggcaggggcttctgctcacagcctcacttctaaccttctggaacccgcccaccactgcccagctcactactgaatccatgccattcaatgttgcagaggggaaggaggttcttctccttgtccacaatctgccccagcaactttttggctacagctggtacaaaggggaaagagtggatggcaaccgtcaaattgtaggatatgcaataggaactcaacaagctaccccagggcccgcaaacagcggtcgagagacaatataccccaatgcatccctgctgatccagaacgtcacccagaatgacacaggattctacaccctacaagtcataaagtcagatcttgtgaatgaagaagcaactggacagttccatgtatacccggagctgcccaagccctccatctccagcaacaactccaaccctgtggaggacaaggatgctgtggccttcacctgtgaacctgagactcaggacacaacctacctgtggtggataaacaatcagagcctcccggtcagtcccaggctgcagctgtccaatggcaacaggaccctcactctactcagtgtcacaaggaatgacacaggaccctatgagtgtgaaatacagaacccagtgagtgcgaaccgcagtgacccagtcaccttgaatgtcacctatggcccggacacccccaccatttccccttcatacacctattaccgtccaggggcaaacctcagcctctcctgctatgcagcctctaacccacctgcacagtactcctggcttatcaatggaacattccagcaaagcacacaagagctctttatccctaacatcactgtgaataatagtggatcctatacctgccacgccaataactcagtcactggctgcaacaggaccacagtcaagacgatcatagtcactgagagacagaatctcaccatgttgcccgggctggactcgaactcctgggctcaagcaatcctcccatctgtttcccaaagtgctgagattacagataatgctctaccacaagaaaatggcctctcacctggggccattgctggcattgtgattggagtagtggccctggttgctctgatagcagtagccctggcatgttttctgcatttcgggaagaccggcagggcaagcgaccagcgtgatctcacagagcacaaaccctcagtgtccaaccacactcaggaccactccaatgacccacctaacaagatgaatgaagttacttattctaccctgaactttgaagcccagcaacccacacaaccaacttcagcctccccatccctaacagccacagaaataatttattcagaagtaaaaaagcagtaatgaaacg

SEQ ID NO: 59308 - DNA, 2105 bp, Homo Sapiens
atttctaattgtacagactttgcagtgtgcagagtcaaatctctcatatcctgtaactttgctgcatgctccttagttttttctttatctacacatatatctggtcagtttgatacatttttttcttttttggtcttctcagctattagaaacagacatgtttgtagaaaagaactcttaccatttgttgcgtctgggacttgtgtggagggtttttgttttggtctgggttggtttgctttttctatttaaaacttagattgtgtgtacacccacacagaaacttcatccagctaccaggctattcctttgtagagtggtgatcaaacaaaaatatgcatctggtgattctttcatttgatttgaaaactgatttcagaaacacattattttcttcttttacctggcagattatttctgagcaagctgaagaatggaggactcagcctacttataaagtaccaaactgttaaggtcacagaaaattatttctggaaggtacattagaagttgttctagcccaactctcttattttacagatggaaaacctggggcccaaaagagggcctggcttagcctaagctgtacaatgacttagtggtagaaaatgaactagaacatttctgaattcccagtccagcattctttccactaagctgatggctgtcttccaggtgcaggagtgcaggttggtacttattacaggactctgctggctgcagtggctctttctggtgctgtggaaagtaccctcttctttgctcagtctgattccatttatgggaagcagtggtggagtttgtacataagatttacagtaaagtctgctgctgtcccaagtttcttaacctttttaaagtcatcttccttccatttctgatttcctagtacatctattatttatttcaatgtaaacaaattccaaataatggaaatttgtctctactacagcttattcaagtttgaactttgagtatatatgctaatgtttacagactggtgagatcaggaaaattgaactgctgttatttcaaaagtgaaagctactctgggacttctaggtcagggtggcagagtgaatactcctgaatcttattcctctcattcaaaaacagagaaattatgcataaatatttttaaaggttttaaaaaatacatagttattcttaaaaataagaaagaaaagtctctttgggccagtaatagaaaagccactatgatggcaggggatcggggggtgctatgaatggatatgggcaattgggaccaggtttttttgcaatgatcctgtctgtgcatgaacccaggacccaagagcacaatacaaataggagctgggctaatctaacttatcccagcagtgtcacagccaggaataagctgcttgttcctgaccagaagtaaagaagaattggcagtcacaagcaagcgcaggaaaccactcaagataggacttggacccaaaatacttttgggctaaaaattcagaactgggctacctaggaggaaagaagacccagagctaccaacttaaggtctggttcaaggttggcacattatcagatttaagctgaggcaacttaaaactgccctatagatacaggtacttacattttttagttatcataaaaattgagcccccaaaacattacaaagaacccagtaaaacctaagatcatgaaaaagcagtcaagagaacccaacaaatgagagaatttatacctgagaaaagaagaacaatctggtgagagtttaaaaataagttaaaattctcaatatatgtacagaagaagttagattttacagaatgaagaacagataatgaaacaagaagagaaagctgtgagaaagaagcgtttagacatcttgaagtgaaaaatattataaatacaatattgaagtaaaagaacagttagactgcacatactttctatagcttaagagaaaattacagaattaggaaatagaactgagaaaatctttcagaatgcagtttagagagagttagaagaaaatgaaagagaaagatggacatgaaagatgacctgaggagctctaacatacatctgctaggagttgcaaaggagaaaaaaaaaaaaaaaaa

SEQ ID NO: 59309 - DNA, 1492 bp, Homo Sapiens
caaagtgggcagcccacgaaagagagtcagaggagagtgcaaggtccccacccaccatgggctcacctgggcccagaggaatccgttatttctaggtcaggcgcaaacagttccttggtttggagcaggagcccgggtctggacgatgggtgaggggaggtgattttggagcagggtctctgggcagggaggggccaggtttgctcagggcagaggcagcagtttagcctctgctggtggcagctctccccactccctgcaaggctgcggtgatcccctgtgaaaatgcattgtccccctcctccagggctccaaggtgctgtccccaagcagtcatcaccccagacctgggtctctgagtctcagtgtgggtggggctgactctgccacccagggctccagctttgtgtcagacccacgggagtttcactcctgactccaccctggtactcctccacctttctaacctcggttttcctcatctggaaaatggggacagggacacctacagcagggggttccatggtgtgctctttccccttggctggtcacaagtaactccggtgactgcagggccaaggtgcatgaagcaacaaagctgagtccagcccgtccttcagtcccacatgcagctgctgggacctctgggaagtcactgagacaaagccgcatggaggagcggggagatatctggctggccttgggagggttggccttggtaacctgtggggaggcgaattccaggcccctctgggtttcctcgtgggtccattctctcccccgagctctggcttgagcacctggctagagcccctctccagggagagctagggacccatgtccagcccaggaggaatggggggcactggggcatacattcttctttttctgcctcattctctgttcccctagaccgggagacaaaggactggatttgaatcctgtctttgcctttcaccagatataaggcattgggcaaggtattgaatctctccaagcctcagttttctcatctgtaaaatgggagtggctgggtgcagtggctcacacctgtaatcccagcactttgggaggtcgaggcggatggaccacctgaggtcgggagttcgagaccagcctggccaacgtggtgaaaccccgtctctactaaaaatacaaaaaattagccgagcgtcgtggcaggcacctgtaatcttagctactcgggaggctgaggcagaagaatcacttgaacctgggaagaggaggttttggtgagctgggatcgtgccactgcactccaaccttggtgacagagcaaaattccatctcaaaaaaaaacaaaactggtgtggtagtgtgcacttgtagtcccagctactcgggaggctgaggcaggaggatcacttgaacccaggaggttgaggctgcagtgagccaaagtcatgccactccacttcaacctgagtgacagagagagaccctgtctcaaaaataaaaaaaaaaaaaaaaa

SEQ ID NO: 59310 - DNA, 1990 bp, Homo Sapiens
gtgttaggtgcttttgcccaactttagactaatttaagtgttctgatcacatttaaggtaggctaggctaagctatgacgtttagtagtagatattttcaactcatgatgggtttgtcaggatgtaaccccatcataagtcaaagagcatctgtaaagacaaagtactttagaaaaaaatacagtgataggatgacaagatcagaaaagagattaagcataggtaggtttgctgtagtgctgttgaaatctaaccttctaaaaacggtctgccaaacctgcatctgctcctccttgtaaaagaagtgaaaggtaatataatattatcaagaatataaaattaaacagacgggaactcttgtaactcagtacacaaaatttctaaaacatggccttaaaggctaagcatgtctgtatttttcctttctgtcttgacagaaaaaatctaacctttctataggtcagactaagcaagttctattaattagcccaaacttcaataggacagattatctgagaatgttcttacttgtagggcactttaattgaaataagactaattctgactcctgattttacgggtgagaaagttgagatccaacaaaattaattaccataaagaacaaaaatctgattgccatttttgttcctttttcaatatacttagtagcccttcctcaaagaaagttttagcacaaaatgtattctcttacttggaattacttctgctgtttgtttctgtatgtaatctgaataaatataatgttaacactggaaaagttcctagaaattagctgttcttcatcttttttggatcaaagatcattttgagaattggataaaatgtgtttgctatgccctgtccatagactactgacttagatatgtaataatttctgacataggtggaaaaacccaagaccaggagatggtaattgtttgaagattcaaaagcaggtcaatgttagaagaaattagaatggtctactcatgcattacccataatagttaagttcttcatattataataatgagatagttttctttcctgtttgccttcccctcctctacactttacaatactagtatcagttttctgagttaatctgcatgttctctgctatatggagacttcttcagtgtatcctcatcatagttagaacttgatttttactcttatttacacatttagttttgccttaatgactgcattgttttccattttatgaaagtcccatttgtttaacctgtctccaatatagaagcttaaatttaaaatatatatgtatgttacattcagtactatggtaaacattctggtacataactgttctgcaagtatatgtgccagaaattcctagaaataaaattgctgggtgaaagaggaagcacaaaaaaaaatttctatgaattactgtttgccttccaaaaagattgaaccaatttgtacctaaccagcaaaacatacagttcatgtttctgtgtaacctcgccatttttaacccttcttttgtgatctttgcaagtctggtaactggaggtatcttacttttatttaatctgtatgtcattaagtattagtgcaattgagctcaatattgttaagatgtcagtttgccccagtgtgacatatatattcagtgtaatcatgatcaaaatcccagcatattttttgtagatattgacaagctaattctaaaacttatgtggaaaggcaagtgaactagaagagcccccaaaatttgaaatggaaaaagaggaacaaagttgagaattcacactacccaattttaatataaggctacataagtcaaaccagtggggtcctggccaaaggataaacatataattcagtgagacagaatagagagctcagaaatagacccacacaaatattatcaactgactgttggcagaagctaaaaagaaattccacaggaaaagggtagttttttcaataaatggtactggaacaatgaacagctttatgc

SEQ ID NO: 59311 - DNA, 2199 bp, Homo Sapiens
caaatgcagaaagagaaaaccaaatacctcatgttctcacttctttgttgttgttgttgagacagactctctgttgcccaggctggagtgcagtggcgctgtcctggctcactgcaacctctgcctcccgagttcgggtagttctcctgcctcagcctcccaggtagctggggctacgggcgcccgccaccacgcccagctaattttttgtgtttttagtagagacagggcttcaccgtgttggccaggatggtcttgatctcctgacctcgtgatctcccctcctcggcctcccaaagtgctgggattacaggcgtgagccaccacacccagccatgttctcactttgaagtgggagctaaacattgggtattcatggatgtaaagatggcaacatcagaccctgggattactaggaaggagagaggggagggagcaagggctgaaaaactatgtattgggcactatgctcactacctgggtgatggtatcatttatattccaaaccttagcatcatgcaaaatccctatgcagcaaacctgaatctaaaataaaagttgaaattattattttaaaagaaaatttacatataaccaggtatttggttcactgagcacacatgtagtaaaatcttccctagagccaggcaaagcttttcagtttttagtgaggagtgcggtgttctctcaccaggttcctagagcacatgatccagcttggactctcccaggatctgttggagaaacatgtaggctcacgatactgaatgagaggagggaccttctatgtacacaataaatacatcaatccttgttttcttacaatctgtttcaagtgagatgggttcctggagcacaatgggttgagagacgctcttctgtgcggatgttccctccccatatctcattttgaaaaatgatcctggatcccctccccattgcatctttaaagcaaagtgacattaatgggataccactggagccggggcattatgcagaccagagtaaagcatgcctctcctatgctttgttgttactattagcttatccactcacgtagagagactatttttgctgcgtggagtctaccctcctgaaccattgtcacagtactcaaggaaggatgcttcggcgtgatggaaacaaaatgtgtgaattccagttctgccacctagttgcagaatgaccatgttagattagttgtttcatgtctaagatcctcattatcttcatttgaaaaataggaataataatagcttcttcttagacctgatgagattactaaaatagatcagcagttttcaaaccttctggtttcagggtccctctgtactcttaaaaattattgagaaccgcagagagcttttgtttatatgagttatagcaatcattatgtatcatatgtcaagttaaacagaaaattatgaaggtttattcattttaaaatgacaactattatgctaacatttttctgtgagaaatatcttccaaaacaaaagaattactgagaatagtgtttttgttttaaatttttgtaagtctctttaatgtctggatttatagaagacaactggattttcaaatatgcttctgaattcagtgtgtcatgttatgttttagttggattatgtagcaaaaataaagcttcacatagatacgtaattggtaagagaagggtatttcgatacccttctcagttaaatgcggatgttcttatttgattaatcagtaaactttgataattgatgttgtcttaaaagttgtgatgtgcaatcagaagccatattgtgaactttatgtactcaatgacataaaatccattggtttaccttgcacttggaatgacttttttgcttttaaaacagtgtcattggccatttggaaaatattagttacctagattgtacagatctcctgaaaattgactcattttatcaaaccatatcaaaaaatcataattcttaatattaccactagtctcatcagataagtcttcagtattgagaagctgtcaagcttaggatggcagatgtatgttttccaaaatgctaatttttgcttgaaaactcaaattttatcattggcaacaagtgttgttttcctggaagtgacaggctcacttcattcatttcagtaatatatctgccaaatgctcaagtctgaataaccacagtttatctaaaactgttctttcaagtt

SEQ ID NO: 59312 - DNA, 363 bp, Homo Sapiens
gaggtgcagctgttggagtctgggggaggcttggtacagcctggggggtccctgagactctcctgtacagcctctggattcacctttagcacctatggcatgagctgggtccgccaggctccagggaaggggctggagtgggtctcagctattagtggtagtggtggtagcacatattacgcagactccgtgaagggccggttcaccatctccagagacaattccaagaacacgctgtatctgcaaatgaacagcctgagagccgaggacacggccgtctattactgtgcggccgccccaagacatgcggggagtcccccctatgactactggggccagggaaccctggtcaccgtctcctca

SEQ ID NO: 59313 - DNA, 3173 bp, Homo Sapiens
gagtttttctattttattgatagttttgtccttcattatttccttcctaatcgttttttgaaggttgattggctgttatttttctagcttcttgagctggaagcactaattttttgccttttaaatttctattattcattacatgtctttgtaagtacccacaagtcttgacatgtgttggaaaaggcggtctcatgcacacagcctttccaccccttctcaccaaataaaaatgggccttgggcctgaaacactttcttaccaagcgatagagtcctcacagcctgtgctggacctgtcactctgtgtgaaatatttttccctgttttacactcagtgtgtcctcctttgctctgcttcagcatgtgtgtcatatgtcacctggctcacctacagtatctccccattgggaaggggatggagggacagggttggtctgctgtagcccaagaagggtgtgtgtagaccagttgttggcatcagctgctgggaggaacttgctcaccatgggataccaacacctattactgaagctgatcttgctttgtctcctctctgtgtaagtaaagcgttgttccatgcagtgcttgactgtgcatcgtgttttctttggtgactatgataccaagatacaatgaacagaagttctaagacttctactcctgatattaggtgacagataccacttgcttgacaatatgtgtttattatcattcagttcaaaatgttttctaattgccattgtggtggttttttctttatctcactcattttacatatgtatttgattcatttccaatgagttgatgcatatttaattttttaaaaaaattgttataaaaacataaaaatttattatcttaaccggttttatttggtgtgtgtgttattgctatctagctcatatccactgtagtttgagatgatactctaagtgattttcatcctttgatatttgttgaggcttgctttataatgaagcccatagtcaattttggtaatgttttgtgtagtcttgaaaagaatgtatgttcttggccaggcacagcccagcactttgggagcctgaggtgggcagactgtttgattccaggaattcaagattagtctggccaaccctgtctctacaaaaaaaatgcaaaaagttagtggtgatgcatgccttagtcccagctactcgggtggctgaggtgggaggattgcttcagcctgggaggttgaggctgcagtgagctgtgattgtgtcactgcactgcagcctgggtgaacagagtgggaccctctctcaaaaaaaggtaagaaaagaatattctgttgttgagtgtagtgttctgtgtatgtcagttaagttgaatttttaattttgttgtttagagctcttactacataatgatttttctctgctaaaaaaaaatgaggtcttggaaaaaaatagtgtcatctataagcattaaaaaaattaaaaatgaggtcctgaatggtgtgctcaaatttccaacatttattatgggatttgtttagttctgtaagtttttgctctatatcttttgaagctgtattgttggatacatgcacatttagaatttttatatcttcttggtggatcaatcccttagtcattataaaatgtccctccttatctttagtaatatttcattaaggtctattttatttgatatgagatagctacctcagcttccttctctatgtcttttgtaagcagcatatagagttgtcctttcatatccatgacttctgcatccatggattcaagcaactgcagattgaaaatattaagagaaaaaaaagatggttgtttctgtactgaacacgtgcagatatttttttctggtcattattccttaatacagtataccaactatttacataacatctacattgattaggtattagaagtaatctagtgatgatttaaagtatatggcagaatataaataggttatggcaaatactacatcattctatacaacaggctttcagaacgtgtaaaataatatgaacaaaaaaatttaaatcaaaatataacaggcttgagcatttgtagattttggcattgttgcgggggtgggatcctgcaccgaatccccctcggataccaaggggatacagtgggaccatttgcagatcctctagagtgctctctcctgtctgtctccctgtctttccgctttaatactctgtcctgcatactctagctgttttgatatcctccgatgctcagtttatctcaattaatgaagtccacacaagctccatctggattctctttccctttgctgggacctgagaattctctcaagacattaagccggggcagtcatagagttcacgttgtttgtttcccatctctcagggatcactgttctctctaaagtccattgtcttaaaaattgtcatttcatatgttttgtctggtttttatttgtgggagaggggttgtttcaagtaaaagggtaaaatcctgtccccaatactttgccttggccaagagtgaaagtggcccattagatgatttttatcagtgattttcaaccttttctacagggttagaattctttgttcaagtaaaatcttatccccaagtgtcatgtgtatgtgaaataaatgagggcaagatggtggtagtgtagtatatgtgcacatgtgcctttgtatgtgttggggatatagcagagcttttttgctgacttggattcctattcccattccttgagggctttatagcccaatttgaaagtcactaatatagagagtacaaataggtatataaaaaagtaagcaaatgagaaaataagccagttattagttacagaggaaacaaactatccaggaaaggaaatttacagtatatctcattttggggtttggaaggatgtgtacaaaatagtgtaattgaaaattgataaaataaaaaatcttatatacttatattgggtaaaggaagataggagaagtgacagagcgagagagagagagtgtttatgtgtgaaggaaataagaaagctcagtcttataagaagtctcagataatgtgtagactttacagaaaagcagtttaagaatggtatttaaaaataaggaattaaataacatgagagttgaaaggtagtttagggggaggtctattgttgattgataaaaaaaaaaaaaaa

SEQ ID NO: 59314 - DNA, 144649 bp, Homo Sapiens
gatcatacagaatatagaacatatttctaaattatgttataaatatattgataatagactgggactttttttttttttttgacagagtcccactgtattgcctctacctcccggattcaagcgattcatgtgcctcagcctcccaagtagctggaattacatgcccaggccaccacacctggctaatttttgtatttttagtagagatggggtttcaccatattggccagcaggtctcaaactcctggcctcaagtgattctcccgcctcagccacccaaagtgctgggattacaggcatgaactactatgcctggctgtagtctgggacatttctgttaagtgttatgaaatgttcttttgctactggtcttaatttaacctgaactagaataagtattcctttattgaaatacccttgaagttgcctataggatgcagctgtttcattcatgattgtttttagagcagtgttaactatgacacttgctctttgatgtcttcagattgccagcaagtcaagggcttacattggaaatactgctatctataaatgtctaagcagcaaggtcagcccttattggcaataaaaaatgtaagactgtggaagcctgtataccctttaccatctcttttatcttttggaattgagaatcccagatttttagaacagcctcaggtttactatatttggtatcatcaacagagaaacatatagctttttaaaacatagtttgtcttatattctaaaaagcgattctcattgtctttcctttggaagatgtcctttctcaccctctccaccaaagagaaaaaattagtgttctatttttttcttaagtatttctataattcatgcaatatggcatatggctggccctcatgagttcattttgatgagtgaggaatggctgcaaaagtttctagacaagggattttccttactttgtgccctttagtgtaatgattctactaagctcacctttgctgtgaatcacttttaaaatgagataatgtttgtgataaaagttgtatatgtgagtgattgtagggcaaaagaaggtcatgagtgatgatgatctacagagtgaggcaagtgacagctggcttggtcattttatttaatttatttgtttatttatttatttatttattgagccagagtctgctctgttacccaggctggagtgcagtggtgtgatctcagctcactgcaacctcctcctcaagggttcaagcgattctcctgcctcagcttcctgagtagctgggattacaggcccgtgccatcacacccaggtaattttcttacttttagtagagacagggtttcgctatgttggccaggctggtctcgaactcctgaccgcaggtgatccacccaaagtgctgggattacaggcatgagccactgtgcctgacctggcctggtcattttagagcagggatataatccagtgactgagcatgtttagtctctgtaagagggagcttacttacaaagttgggcaggaggtcagggcctcagccaatcaagaaggaaactgaatgtaaatcaagaaatacgactataactcagatagtcgggctgaaccaaaccaatacagacctaaccaattcaggtggccagaatttacaccagatagcaggtttggggatgcaagactaatccacatgtcactggctgattgtttgcagtttactgctgtatggtctgacttggtcaagattagctcaaagactgtaagggccagagcttatgttgattggagttctgtgctataggtgactgggatttaggaaagatggcagctaggtgtaccttctgccaagaaactcattttcctactccgctgggtcggctacagaacatgactgttacaataatacttggttatttacaacagaacagcattctcaagatttctaagagtattcctgttttggccaggcatggtggctcacgcctgtaatcccagcactttgggaggccgaggcaggcagatcacgaggtcaggagttcaagaccagcctggccaatatggtgaaacccagtctgtactaaaaatacaaaaattagctgggcgtggtggcgcacgcctgtagtcccagctgcttgggaggctgaggcgggagagtcacttgaacctgggaggcagaagttggagtgagccgagatagcgccactgcactccagcctgggtgacagagcgagacttcgtctcaaaaaaaaaaaaaaagtattcctgttttgggcttcttgcttattcctttagagaaggcccaagaacatcaatgcaaaattagactacctagtattaaatgtactgcattaacctccttctagatttagaacatctctctgttcccatcattcccatcttatttctgtttagcaaacttgaatttaattaaatagtatgcagattacgtgtttttccctcggttggtctcagatctggaatgtcagtctcagttcccacatattgtcatagtgtaagcccctcatctaattgtgtgtgaatctgctgttccttcatttggtatcagttctcatatgtctctcataatgtgagcctctcattacattgaatgaacatttcaaagtatgtatattttttgtacaatatggcccctgaatccacgtttactacattctctggtgttcaggtgaagaaatcgaattttttcttaaagctaaaggaaaaagtgaatatattgtgcataatgagagtgatatattcgttgctaacatgaggcctaagggatttttaagcgtttttaattcggtctgtaggcgacttttgccttatgtggtatcttttgggcatcattattcagactatcagtattttgggctttgaaccaatttgtttcatggatgctaacttggaagtagaaactggagctgttgtcaccatagtttatggaagcagtaccgtttttccttagagtgacaaaagggagtgtctggaatctccaatttgttcaacttctttaccctctagcttaggagaaagaacatcctcagggcatctgtgggttcataattcaggagtcaaggctgtttgatgatttctgtgagagaatctgatcattccctgtggtctccagtccatcttgagggacctgtgtctcttagttttggatgtgtccatttcctcttttaggttctgaagcactcatgaattctgactatgtgcaaggtgtagttagctattgttttaggatcactgtggatggtgcaggaacgtctcccacatttttccagatatccatgcctggactctcctttgtggatattggatgtaactcagctgatctgatgggagcgaagatgcctgtagtcttaggaactttgtatggttttatgtacttagtactatatttgaaggagttaactatacactccagcagttaaagggatggcttggtattcctagactatgctatccaatagaagtatgtgagatgtataatttaaatttttctaataaccacatttaaaaaattaaaaataagtaaaattaattttaatagtaatttaatccatattttcaaaacattatttcaagatgtgataaatattttaaaaacatattaatgagatatttatgttcttttttgtactaagtctttgaaattctttgtatactttatacttacagcatacctcagcacacactacttttttttttttgtttttggagacagagtcttactgtgtcgcccaggctggagtgtgtggcgtgatctcagctcactgcagcctcaacctcctgggctcaagcagtcctcccacctcagctttctgagtagctaggaccacaagtgtgcactaccacacccagctaatttttgtattttatatagagacacggttttgccatgttgcccaggctggtctcgaactcctgagagctcaagcagtctgcttgtctcagcctcccaaagtgctgggattataggtgtgagccaccacgcctggcccacactacttttttttagtgttctacatttttaactattaaggtaaaatgtaatcccatcaaaatgataaagctatgtttaatggaaaaatattttacactgcttctgtgtttggatttaaatttaaattaatttaaaattaaataaaattaaaaattcagtttttcagtcacagtagtcacatttcactcgttcagtggacacatgttacaatggccaccatgttggacagagcagctctagaggaccaagaatgtctttcagattaatcagtaagtttgtttctttgagagtaagctaactttccccaaggtattaataaggtagttgtcagattgtttaccctatcaggtttgactggcagagaaatcaaatcccttcttgtctctaagggcttttcacgtaagtttctcacttagtttcagagtcatttcctgtttgggatccccctctagcttttttggattggtgtttgtagtttacttggctggattctcacttagtgacctgggatatgacccagtaaggagccccatttgaatagacctccagatgatttcagttttatgtcactttgccagggccagtagaacagaatgaacaattcagtctccggtaagtcagctgattccagtcatttcaaaggcataggtttaaagtaacaggttccaaaccagccagcagactgtgcaggagggtcatgaaactcttagcttcttgtagatacagagagttccttgcaatggagaatctgccgtgcatcatctgggtaaaaggaaaaaagctctttctgcaacttcttgagatgacagacctgagtttttttggttcataagtggcgttaagaatctgtgtaagcaagagattttgcactgttcgcccacagaatgaatttgctctgttgttgaattttgttagaaatacacagtttgtttagtttttataactagttggtggcatctaaaattaaggagatttcacctttagggacaaaaaagacttccaactacctcttgaaaatttagaagaccctgatagtgttacgccagcaagaactgactggagctaagtagccattgctccctatagctggaaaacaagtagtttctaagaagaggatcaaacagatcccctttcactccaacagtcctctgaattttttttcccttgctctcttttgcctgctctccttttcctttagtcccttttttgtattttttcttctactacaaaaataaaaatattccttctgttaggcagaggggaggtagtggaaaacagatttgtcagcatcattatgtatatatatgtacatgtatgtttctatttaggggataatcaatacaaaagaggtagattaaaggaaattaggcagcaacaatagaacaaaaagcacaacaggatacaagagtaagagtggaagaaactgcaaacaggccttgaacttatactgataaaggaattttatcaccaaaatttgttcatgcatatttctgctttcagtatatcagtgtaataattcctttctccaagttggttgagtttcaattgaagacaagtaataatagttactatttatggaatctttaatgctaatttatttttccttaaatattaagttgagtactatgtgccagacaataggaatatagcagtgaacaaagtagtcagaatgtcctgccttcgtggaactttcattttagtggaggagaaacattaaagactaataagtaaaatatttagtatgttaggtggggataggtgctgaggaaaaaataaaggactaaagagatatggtatgccaggaataaagaattaatatttttgatagtgcagccagaaaaggcctaattgagaagctggtatttgagtcaaggccagagggaactgaaggagtgagtcctgtggatatctggagagaagaatgttccagggaacaacgagtgcagaggccctgagacaggaatatatttcatgcgttcaaagagtagaaaggaaataagtatgatgggagtgaggagaatcgtaggagatgaagtcagagaagattcagattacatcatataattttataagccattttaaggcagtaagattggaagccacagagggtttggaacagaggagagagacaaaagctggttttttgaaaatagcctgaagagggggaatatattagttagggtatagagtaggtatagctgctgtaacaaagagttacgagacatgaaagtctgagcagtctaggtagggaagacattcggtaatccagaatttgtccatttttttgctttaccgttcttgaggacttggtcctaatctatgtgatcaaaactagggacactgtcaagttggtattccagcctgtaagaaaaagggaagcagatgaagtccagagcaaagaatttccttttaaacaagtgaagcagatattacatgtttcacttcagtttacattccatggataggatcacttgacatcaagggaggttgggaaatatagtctcaggctgggtgaccatttggctaaaaggaagggaaaacagatgtgacaagcagtctaccacagtctgccactttggccttcatcctacctgttgataatattcctatatttcttcctcaagggagacaacccatagtaccatccattagttgcattaatccaagctcactgagaggcacagtactttagatctgcaagtccagtgacctataaacaaatcacagttatctactcctcctccatccctcccacacatacccaacatattatagtggatcagaaacaggaaaacagtaataaaatctcccatttgggaaaataaacaatgaaaaaactcttttcatgagaatgatgaagatctcatgccctcgcagtggattaatatccttagttctgctttctggtaagaatgaatgtcaatattcattgcattaagatccctgtctttgctgtctgggtgtttcttccttacattaacctctgtggccacatctgaagttgatgttgaaagtttgcccactttgaaggctattcagttttcatagcctgcttcttgctactgcaggttttccagcttgcaagttacacagtcacaagcctttgcaccctagcttataatttatttgacaaatactattccgtcagaaacataataggattcttttacgtttctctccattcagttctctgtgccagtaactacaccaaagttattttctggatgtggttcttaagcctgccttatttatttctgtctatgcacccaacatcttttgatggcctcattttaatgaagcacatcctcatccctcattttaatggtcactgtcttaaaactatttgaaacaacaagtattggtgggatagcagcatccttaatctaatcttaactgcagagctggatccctttgttttgtcaagaattcctttgaccaaggcactaaacctgacatggggtattggctgcaaggccccacatttaagcggccttatttctttccatctttgcttacaaactagccaattcttgcttgagtaaacatggcgaagaaccaccaacacccggtattgtggcatttttcatgtactttttctgggactatgggctttttatgggcactagttttgcagattattgtaggcaacagtttaatcaattgttttatttccacataacagtggttattagtatcgtagtagtatgttctccttttgcctgctacctaattactaagctagtaccacgttttaggattttgttatagcagtatcttaattctgatattaatttctatattaaggaaaaggccagcttactgagttaggtggtatgggtgctatctggacccaaatcccaaacctatattttaagcattatgctattcatatatatattctatatatctaatatatatttatatatataaaatacatattacacacacacacagagtatacctctttctgatggctagttaacttttgagatcaagaacttagctatacctcatacttactacaattcctagcctatagtaggtgttcaataaatgtttgaatgaacaaatacccattttatacctgagtaagttaaggcatagagacttggccaaactttacttagaatcaaaaccagaacataatctaaaccctgcacacaagaatatatgtacaggagaagctatcttcgacatcatttccacaaaatggggaatatcttatataaagatagcattgtttgatcttagaaatagttaccagaaaatcttttgatgtgactattaaagtttaaaatagcagttatgggagctggtaaagtctacatctttataatggagagaagaaaaactctgtatcaaagagtgaacgtggtctttattccaacatttttagtacctaaaataattataccaaggacaaaagatagatttttttaaaatttaagcagtatttgaaatgtgaggaaaactatccatagcacattgaagcaatcattgtgtcaaagtattttaaatagttctttatacacacatacatacatatatgcatacatgcacacacatacatatatacgtactcagggagttactttaaaatggtgagttccacctcttaaaaattaatgagcttagggccgggcgcggtggctcacgcctgtaatcccagcactttgggaggccgaggcgggtggatcatgaggtcaggagatcgagaccatcctggctaacaaggtgaaaccctgtttctactaaaaatacaaaaaattagccgggcgcggtggcgggcgcctgtagtcccagctactcgggaggctgaggcaggagaatggcgtgaacccgggaagcggagcttgcagtgagccgagattgcgccactgcagtccgcagtctggcctgggcgacagagcgagactccgtctcaaaaaaaaaaaacaacaacaaaaaaaaaattaatgagcttataatgttttgtgtattcatgagggttcctactgaactaagaaagtactctatttgttattgtactttgaattatatgtaagtgaatccttaatagagatataatagttaatattgatattgaaattgtgaatgaaaaaagtctctaaaacttattcataagccttcgaaggacatatatcttttatataaattgaaaatagtaagtaactaacaaaacataggtttccttaagacagacttttttatgtctactatttggtttgagatgttacttttttttctcatagggggaacggtgtatttttaacaacgggaatcagtaactggaagtacaagattggttatttaataatgttaaaaatgaggctttgaaaagcagaggtaagaatataacttttttgcacttaattcttaatagattcgagtatttgccaaatttctatgaagaactgcttcaagaattgggaagggtctgagattttaccccacttgcaagctgacaagttagtctgccacggtgccatggatgttggcaggacatgagagtcatggatcaaggtcgaggattgtttatgctcatagcactagcaagagtaccaggtgacacctgtatgtgagtagtttgtgttacaggagaagaaccctgaattaggggaacctgagtcttttagaatggacagtaaacctgcctgacttttttcctggagggaggctttatctgtattatacagaacagtagacaaatctgccctttgttctagtataagacactatctctgacttctaagattgttcattatacaaacatccgtgaaaagatagtctggaacaaaggctgtctatgtctctgcttgtgagacgtgtagaaacatgagagatttgtgaagaattgtcttccaacactttcttactctaaattgctttctacacttagcttacttaacagtccaagaagttattctttaaatatgtactgttgataaggatgattgttataattttttttaaatagtgaaaaaatggaaactactgaagtcacccaacaataggggattgtttaattataacatgttcccagtgtcatagttaacaattaatggccgggggcggtggttcatgcctgtaatcccagcactttgggaggctgaggtgagcagatcacttgaggccaggagttcaagaccagcctggccaacatggcaaaaccccatctctactaaaaatacaaaaattagctgagcatgacggcgcatgcctatagtcccagctactcagaaggctgaggcaggagaatggcttaaaccccggaggcggggattgcagtgagccgagagcgcgccactgcactccagcctgggtgacagagcgagactctgtctcacaaaaaaaaaaaaaaaaaattaatattgtaaaactacattattgacatatatgttcactgaataattaagtgaaataagcagatgataaaatgtacatgtggtttgatcccactattaaaaaattttacaaatgcacacacatgaagaacgtaccaaagtatgtatttcagtggatggaattgtgaatgttttctatttgtgcttgtctattttcttttcttcaacttctttgcaattgaatactttagaatttgtaataaaggaaaaaatctctttctctttaaatttaaaagtgaaaagtgatttaagaatttttttcttcacttaaagaaaaacctttcatcagcttaactggggattgaagagtgttaatttttttttgactctggagttacttacatgtgcaatgtagcacaagaagagaatattagatatcttcactattaaaaaagttcctatctataagagataaagttgagtttcttttagcaatatgttgtattatttattatcacataaatgtcatcaagggtaacaaatcttagaaaaagctttctgacaggacaatcttaaattatagagagtagtgcagcttagtaagtatacattctggtcctatttagttgggttaggttgttaagtacactgaaataatttgtttttattttctgcctatgtgtcatattctaaaatatgtataaataatagcatttttataagttggcatttttgttacgcttctcatgattttttccctttccttaacaaaggtgctgttatcagaatagtcttctgggtataaattaaaaatgactgaagttcaagcaatggtagaattctctgtggagctaaacaagttctacaatgtggatttgtttcagagagggtatgtattttattgtgaaaatgatatattttgcataagatgtacagtttaaatttaaatttaattacatatttttattccagcatatataaggaaaacaatgaactatattcaagtaattattttctcagataaattttatttattaaatagatattttgggattattcacatgaatttaatgataatgctggatatactgaacctgtgtttatgaatttgtagtgagccttgagaggactttactgtaaatgtataaggtctaatttttgctctttaaaatcttatagtataatgggaaaaaataagacatgcatacaaagcaactaaatagaaatacaaacatacatgatgaagcttatttcacttgatttttctgtatcagtgaatgtagttttataatatcatttttaattattaactattacactgtgacatgttataatttaacagtcacccactgttgggtatttcatttgttttcatcttttcactatttcacgaaaacactaaaacaataatctttatcaatggtacctataaagcaatgtaataacttcttggcgttttggctaagatcaataagtatgtataagaggtgctctaggaatcaacagaaagacgtctttctggtttagtatgttagaaaaggcattatggagggataagatcaaagtatggctaagacttggataggcaaagtataaagtgaaagatcatatttgtagaagagaacagcatgattcagtacagccacatgaatcaagtgttggaaatagaaacgaacatgttatttttaagaataattaggggccaggtgtggtggctcacacctgtaatcccaggactttgggaggccgaggcgggcagatcaccagaggtcaggagtttgagaccaacctggccaacatggtgaaaccctacctctactaaaaatacaaaaattagccgggcgtggtggtgcacgcctgtaatcccagctacttaggagtctgaggcaggagaatcgcttgaatccaggagacagagtttgcagtgagccgagattgcgctagtgcactccagcctgggcaacagagcaagactccatctcaaggaacgttaaaaaaaataaaaattaaaaaaaaagaatatttaggaaattggatattttctaggagaattacagaagaaaggtagtaaagaatggcaaggttatatttgtgaaagactttaatgtctagagaagagttgacactagggatttgggtaaccatcaatagtttctaagtaaggataaaattttatcactattattacaataagcacttactaacatgatggatattatgatacattagactgatggttgtgtagaagaaatagaaacctaggaaacagtttagaggcacttgatagtaactcaagatataaatctggagatctatacaaagagtggtggcagtgggactaacagaagaagtagagcaagagattctctattttttttttttgccttgaccttgccatcttgttgaaaaaataaaaacagctgtgcctgtgctgtggtctgctctatatggtctctaatttcttagcaggccagcctggacttgttctcatggtggagacaagagtctgagatagagagcagaaggccgggtgcggtggctcacgcctgtaatcccagcactttgggaggccaaggcgggcagatcaccagagttcaggagttcgagaccagcctggccaacatggtgaagccccatctctactaaaaatataaaaattacccaggtgtggtggtggacgcctgtaatcccagctactcgggaggctgaggcagaagaattgcttgaacccaggagacgtaggtttcagtgagccgacacggtgccactgcactccagcctgggtaacagagtgagactctatctaaaaaaaaaaacaaaaaaagaaagagagcagaagatgcaagtctccttcaattgacacactgttacttccactgcattccattggccaagcaagtcacagtgcgaggtcacgagtcaggctggtggctttttggccagtacaattcacttaaaaaactttgtggactgtccatatggctgataagtttattccatgctttaaagcccacagccacagttgtttttgagacatgcttgctctctagatagcatatctaccaatctctgctacttggggattagaattctgtgggatcatgcccatcaactttctaaaaatccttttgtcatgctgagaacgtctgcttacatcttaattcttttagtgatcttaagaaaggaagctacagctacatccttgagttgatctttgttcaagggctttgttttattttcaggagactgcagatgaaacagttttattttccaacccagcaagttctagttgctctagatttcttctagattctgcttataaaatgactagctctttctttagttcatctctatcttgcagaaccttatacttagctaggagcaaccagttggcgtttttggtattctgcttggaaattaatttgctaagtccaaaagtttcttagatacattttctgaattattccaggttagtgtaagatagcatattacatcactccataacatggttaccattttcctcatctcctatagtttcctcattatttttccaccatttgtagctgtaactgttagtttggccccagaattaatgccacttattttaagtttttgttatggcacacaccacttctaggtatcgatttctgtattgtttattgtcacaataatgcagctaaccacaaacacaaagactcaatggcattatggcaataaacatttatttttgctcctaagtctgtggatcatctcaacggttctactgatctagggtggcttggctcatctttgctgggctcacttcatgaatgcacagtcagatggcagattggccgggcactagctggatgcagagtggcctcagctgggcagtctcagttctgtttcacagtctctcatcctgcagcttattctcatggacaaggcatgggtccacagaagagagaaaccatgccagcagacctcatatcatctaggcttggaaatgatgcactgttacacctccaccacaagatactggccaaagcaagtcataagtaaggccagcccacatttaaaaggtgggcaactacactccacttcttaatgggagtcacactgtaagaggtctgaatataaggaagagcaaaatataggtgacatttttaaaatcaatctacaggttacattttgtaggtttgtttttaacaacatgattttgacaagctaaatgtgtaaaaagcaattcagtattggagttagatttgaagactagctagaaaacaaattgcttgcttaagttgtattcatgaaaaaaatgattatttggaaaccattactgtttataaaatagttttcaaatatatgtagtgtcctctgacctatatataaaatatatcattataaaattataaaatattttaatgtgtaatataaacataatatcaacatgtaaaattgttctttccaagtaaaacagtgttactctttagacaaaaaagtcatgatgtgaaatcactttgcttaataaaatcatgttaagttttacctcatacaattttaacacggtgttgtgtattaacaatcaatgctataaatgtgttctaaagaatagaggatagaaatgtaataacttaatattcacaaacacattcttttagccactaacctcagtattttattcttcctctaaaaaaataaattcaagttttctgacaatggaaaaaatagatgtatacttaatctctacctgctgcacttctgtaaagatactaaagagcatctctttctcttatgactacttataaaagatttattactattatagttcatttttatgctagatcaaagcaggaaaaggatctacattattattacacttgaaaaataacttatagaagagcaaaattaaatttgttaagtaaagcgcttttcctgttcatctgtgagaatatgtttttgtggccctttgcaactttctgtctttcttgaagaccattcttataatgaacttaacaaaacattgttaataaatagacatccttacttctttatagccccctacctaaggtgatcctttaaattgtgttttacttaacagagtatgggaaataaataaggtatgaaataagaacagaagaatagattgctttgctttagtgcttatctcattgcattggattatttatagataaattgattatatctcttttttctgattaaaatattttcttcccttatattttctaacttttttttttaatataaaggaagacatcgacttttttttccttataattctctttaggatcctaaaatacacctacaattcagaagtacttatactgccatatttaagatgataacttaataagaaaaataatttttctttttaatttgtctgaattgtagggactttttttagagttaaaaggacaatataaagcatctagtttaaaaacttatacagtttataaatggtataagtaatttaagttacaaaaataagtttttaaacaccctgttatgctaggatgtccgtataatttattgaccaaatcaagatacttttttttttttttttaagacagtctttgctctgtcgcccaggctggagtgcggtggcttgatctcggctcactgcaagctccgcctcccgggttcatgccattctcctgcctcagccttccgagtagctgggactacaggcgcccactaccacacccagctaattttttgtatttttattaaagacgaggtttcaccatgttagctagtatggtcttgatctcctgacctcatgatccgcccgcctcggcgtcccaaagtgctgggattacaggcatgagccaccgcgcccggccttcaagatactttttaacatgaaaggaggcactgttaataataggcccagacaaatgaaaaccaggatggcttcaggcaaaccaggacataaggccatccttgtaataatcaaatattccttaaatcttaactttttttttttttaagtaacttaaagcagcaaacatttgttgtttctaatgagtctttaggttggagcttggctgatgtcatcgaagcttgtccacgcgtttgtggtcagctgtggactgattggtctaagatggccttggttgggacttctcagctctcctccacataatctctcatcctctaacaggctaggctgggcttaaacaactcttagctttaattgaattagaaaattgtatttttgcttagacttatcgggtgtaatagattattcaatgttaaaaaaagttattttaaaaaatctgtgcttgccttcagaaaggaataaacagattactaatgtatttacatgataattaatttttactataattacattgttttgccttaatggtaaacagaaagctcagatactaacaatctaaagaaaaactagttttattttaattttactctattctatcattttgtttaatagagtggatttttaaactctgaaaacgaagtcaaaattgtaaagcactgatcataaatatgatgctattaaatggaatgtggatgtatgtcttataaatgagtaatataaattatcttaagatttgtattatattaggagtatctaattacaagataatagacttcccaatgacttcattcaaaatacatttgtcaagaggactccaaaggagaaggaaatattgccctttaaatagacacagaaacattgctatttgaacacctgttctcattggcataaaggataagaggatggaattaaattatggttgtagtaaatttcagttaggttttaaagtgggggaaatttttctttgtttggagatgattgcaaaattgttgaagtatctttttctagaatgctttaggtcagtgctattctcagtagcttgtctgcagatggtttgtgactggttcaggatgaagcactgttgccagaatggaaatgaatgctgctttcttcattaaattttgctaccaaaaaaaagttagttaaaatagtgtgctttgcaatatagttgatttactttattttactgcagattggtaacaaccatttcacaaaaatgcacccgtctgtgtaccatatttgaagtagtacagctttagaatattagcaatggcatcttgagtggagttgggtttcattcattttgaaaagcggcaaatatttagaagacatttagaagaactttgacaaagtgctatgctttaatcttttatcagactttgcaagtgaaatgttatcagtttgatttgtttccacatatcgttggaacagtcaataatccagcatgctactactaataaattaagtagtgaggaaaatattgttggagtcagaagttgaaagtagtactttgttctttatttatctggattactgtagaacagttaattgaatacctgtagctactattacttttcttaatcatatactgccaccatttccttgtcataagataaactactacaaagaacatattatgatttggaaatggaggaaagtaaggatatagatttagaaattatatatatacgtgtgtgtgtgtgtgtgtgtatatatatatatatatatatatatatatttttttttttttttagatggagtctcactcttgcccaggctggagggcagtggcgtgatcttggctcactgcaacctctgccttctgggttcaagcagttctccctgtctcagcctcctgaatagctgggattacaggtgcctgccaccacgcccagctaattgttatgtttttagtagaggtggcgttttgccctgttggccaggctggtctcaaactcctgaccttaggtgatccgccctcctcggcctcccaaagtgctgggattacaggcgtgagtgaccgcacccggcctagaaattacattcttaaattttagtaacatcacaaaaccatggaacttaaatccttttggaaaacctctgtagaaccctgtaaaccaggtttgatacaacacagtttttttgtttgttttttgttttttttgagatggagtttcgctcttgttgcccaggctggagcgtagtgatgcaatgtcggctcatcgcaacctccacctccccggatcaagcaattctcctgcctcagcctcctgagtagctgggattacaggcatgcgtcaccatgccctgtaacacagtttttaacaaaattatcttaaatcccttttgtttatgattctgaggttgttaaacttatggaagatttgtagtttgatttaaaaggactatcagctaagagtcagaaattcagctgaattttgttttattgacattgattacaacttttgaaaaaagtgattccttgtctataatgtcatgtatgtgttgtattcttaaagttcatgaacttgccgggtgtggtggctcacgcctgtgatcccagcactttgggaggccgaagcaggctgatcacctgaggtcaggagttcgagaccaacctggccaacatggtgaaaccctgtctctactaaaagtacaaaaattagccaggcatggtggtgggtgcctgcagtcccaactacttgggaggctgaggcaggagaatcacttgaaccccagaggcggaggttgcagtgagctgagatcgtgccactgcactccagcctgggtgacaagaacaagattctgtctcaaaaaaaaaaaaaaaaaagttcaggaattgaggacttctgattaagcattggtgattggagctcacaagaaactacctcaaatttttcataaggccttcaaaactgtctgaaattgtctgtcttcagtaagatataaggactgagaatactcgataagaagttaattggtttctcagttttaagaatcagcccttctctgtactccgcaatttgttttctttcaacagtttacgtcagctatcggaatataaatatttctttcattgttaatgttagctgtgacctttactcattttttaatctgtgctatggtataggggtacatttagtctgaatcagcagtttacagatggagtacaagggtattggatttaaggggctagtaagttctgcttttctggaagcttttataatttgatgttggcgatatgaaaaaaaaacagttgtgaaaatcataattgccaatgtgtattcttctttttgtttttaaaactggaaactcattttgttttcagtttcaccattctttaggtgagaaaggatgtctgcagtctttgaaggatcattataatggatcataacagtgaatgatggggccaatagtaattgaatatcccaacaatctgccattactggctttgaacacatatgtttttaaagtataagtaaatagaggaggtcaaattaactgtgggaaaaaaaaactactaccgaaaaccaaaaaagatttagtatttacttaatgctgtcaattaactagctttaaaggactaagtgttattatgagaaatgtctatatgaaaatcaaaacataaatgacatgacttaaatgtagggcaaacctcaatggggaaagaaacatgaaacaaatttgtgtatttattaactatatatatataatactgtgtttctacattaatgaaaagttttctgcatctctgcaacttcaatatgtaacttatgaaacaatttgcataaggataaacttaacttatggttgagtagtacttaacccaggggctacccatatggatcttagagttccacctgtaaataacaatatgtatactcaaagaggtaaccaataaattggctagataatcagacagtaagtatagacgtttcttcatattaataaagaccttttttggggaaacaacaagtgggcttgttgttttcttggcaaaattaaagaatggattttaaaagaatatattgggataaaagtttacatataaaaaattaaataattctgtaagtgttcagttttaaaagattttacctacaaagaaataagagtttggtctcaaactttttcttagtattacttaagatcctgaaataatgaaacaacatcttcagaagtttgcaggaaagttgtagtgacccaagtattttatctttttgtaacaatagggagatactatgagaaaatacagtctcagaaaatatactttccatttacttattctgaatagattacttgtgatatgttccagagcacgatgggagagagtaaaaatttagaactcggaattagggaagttgtagaaaataggctttgaaacttgttaaagttattgaaataagtcaaaaaactaaattttacaaaagtaaatgttaggctctttgaaaaacaatttccattttgaagagattagtgagttgctttatttctctatatttattaataaaacatggaacgggagaatgatggcggaggaattgtgaaatttctttcataaaaagcaagaaaaaatttttaatcattctttctatagatacttataccatatattcattttttcgagaaacttttttttactgtctgataaaatgagagattatatgtggttattggaaaaaaagaaacaaaccagccagagtcaacatagcaaaaggaagaatggataaaggaagcagtagcaaaaacagaaaatacagaatacaatgacaagtagaaacattcaaaaccattctgactataaaactcataaatttaagttgtcttgttcaaaggcagatttgcaggatttaagtccaataattttctgttcataaaagacatctcatattttgaaaataaatgcctacaaatttaaaatacttacagtaatcctcccttaagtagttttactttctgtggtttcagttacctgcaatccacctcagtctgaaaacattaaatggaaaattctagaaataaacaattcatagtttttaaattgcacaccattctgaatagcaggatgaaatcgtgcacgtccctcttcgtccctctcaggacagaaattcttttgtccagcatatatctatgttgcatataccaccagccaattagtcacttagtagctggtgttggttatgagatcaactgtcatagtatcacagtgcttgtttcaggtaacccttatgttatttaatagtggcccaagagtgcaagagtactgttgctgacaatttggattcacgagaagctgtaaagtgcttcccttaagggaaaagacgaaagttctcgactttaggaaagaaaaaatctcttatgcagaggttgctaaaatctgtggtaagaatgaattatctgtgacgttgtgaagaaggaaaaaaaattcatgctagttttgctgctacacctcaaactgcaagttatagccacagtgcatgataagtgcttaagatggaaaagacagcagggcacagtgggcttatgcctgtaatcccagtactttgggaagctgaggtgggaggatctcttgaacccaggagcttgagaccagcctgggcaacaatatagtgaggccctatctaccaaaaaaattacaaaaacaaacaaacagctagctggacatggtggtgcttgcctgtagtcccagttactcaggaggctgagaggtgggagagtcgcttgagtccaggagttgaaggctgcgatgagctgtgattgcaccagcctagcctggatgactgagcaagatctaaaaaaaaattgatggaaaagctattaagtttgtaggtgggagacatggacccagaaacgtgttctgattgatggcagtcaggttcagtactatctgaggtttcggtcttccactggtggtcttggagtttatcacctgagtgtaaggggagactattgtatttagtgaattgaaccttttatcattatgaaaagaccctgtttatatcctagtagctttttgctttgaactattttgtctaatattaatattataacatcagctttcttctagttaatatttacaagaaatacctttttcaattatttcactttcaacctttctctttccttgtattctatattaattgcaaacaacatataatgggatttatctttttcattttctagggcactttttgtgtttaagtggaacatttaatccatttatatttaatgtaatggctgatttatttgtgattatgttcataatttcatattttgtattttctatgtccgctcttcatttgctctcctatactcttttgtttcatgttctgatctctaccagtgtttcaggtttattcttcaagaggacattcacttttgccaggctcttagggcattaccaatctaggactaacttttgtttctttaatggaaagtttcaaacataaaagtatagtaagcacacacctatcacctagcctcggttatcaaagttttttcttcctatttcacctgttgttccccccagctgttttttcagtatgtatctccaacagataaggacttctgtttttaacatatttgtaaaatcattattgtacttaaataaatgtttaaaataattccttgatatcaaataatccagttagtgtacacagtccctcagtcatctcataagtgtgttcttaattatttgtttgaatcaatattcaccccaaaattcatagcttgcatttggttaatatgtctcttacattttccaaaatttaaaattgatggtttaatctaaaggattgattaaattccagttgtttttgagacgaatcctcaagtgatgctatgttcttcctattgcattgcatcagaggacaggtaatttctggttttctcttttttgtgatatgattgattcaggtgttatatcaacctaatggacccattaaacagttccctatcacttaattgatggtacccattgatgatctttacccagagtcattatttcactagaggttataaaatggagatatccagggctgggcacggtggctcacacttgtaatcccagcactttgagaggctgaagcgggaagatcacctgaggtcaggagttcaagaccagcctggccaacatggtgaaaccccatctctactaaaaatacaaaaaattagctgggcatggtggtgagcacctgtaatcccagctactcaggagtctgaagcaggagaattgcttgaacctgggaggcagaggttgcagtgagctgagattgcaccattgcactccaacctgggcaataagagcttttttgtacatataaaaaattaaataattctgtaagtattcagtttgaaaagatgttacctacaaagaaatgagagtctggtctcaaactttttcttagtattacttaagatcctgaaataatgaaacaacgttttcagaagtttgcaggaaagctgtctcaaaaaaaaatggagatatccaaattctgttattccttgtgcatttattagctggaattctgtgaagaattttgcctcattaactatttggttattctgacatatagtttacacagaaaagacataataaatgttttattatttctccctagttacttgtattcagaatattttgttgttgccgtagcatattacacatatgatcactttttattttgtgccaatataaactcatggattttcaacatatttgctgataatattgtgtcactatcagctgggtgctgtggctcacgtctgttaccccagcactttgggaggtcaaggcaggtggatcacctgaggtcaggagtttgagaccagcctggccaacattgtgaaaacccgtctctactaaaaatacaaaaattagccggtggcacgcacctataatcccagctactcaggaggctgagatgggagaattgcttgagactcagaggtggaggttgctgtaagctgagatggcgctactgcactccagtctgggcaacagagtgaaaccctgtctcaaaaaagaaaaaaaaacattgtgtcactatcctttctgatgcttagagggagcccttcaggttggtttctgtgaatttcccacaggacagtctaagcagtgtttgatagttttcttgttttctattatgattaggtgttgcagactcttgtacattctttgatccagacctggagtcagccaaggagccctggttccttttattaggaaatagtacttagaaatcataatgtatatactaaaggtacacattttggggtcatttcttctaagtcctttcagttaacagcattagcaaatttttttttttttttttgagatggagtctcactctgtcgcccaggccagagtgcactggcgccgtctcagctcactgcaacctctgcctcctgggttcaagcgattctcctgcctcagcctcccaagtagctgggattacaggcgcccacaaccacgcctggctaatttttgtatttttagtagagatggggtgtcaccatgttggccaggctggtctcgtactcctgacctcgtgatccacctgccttggcctcccaaagtgctgggattacaggcatgagtcaccatgctccaccacaaatacatttttataagaaaaatgcatcattaatgtatactgatattttcaattccagtttaagtttacaaggattttacttttttaattttatgtttgtgtctctttttacttatagcgaaaatcttggttcctagtaatgtagatcattacttactttatgtatgtgtgtggacatttctatatagaatagtttcaaaataatactaacaacattaccaccaagaccataaatatttaaaatttcttcatgggttttttttttttttttttgccgagatatatcccgtgaggaataggcagtcaaaatactgtgttttaaaaatcacttgaagtatttctctgtggaattgcaatcaagtagatatacattaaatttatttgttttagtgttgtttagggattgacattttctttgttttgtaattatataaaaaatttacgtgggtccaaaaccaaaactctgtaaagtccactatattgagatagatcttgttttgatccctgtcccttctctctcctcatcccataggtaaccattttatttttattagtttttggtatatcctttttttcttttgaaaatagaggcaaataaatatatagtcatacccttccatcttacacaaaggtagcataggatacatacactctgtaccctacttttgttgtttaaaagtatatcttagaggtaactcctctaagtgtgagtgattaacattcgggtggtaacacctgaatccatcatatcccaaaaaaaaagagccagacattttatgtcctttgatacaatgctataggaagtacataatcaaacctttagattaaaccaccaaatttaaatttacaaaaatctaagagatatttcatattccctgttacaactgcattttacaccattgtatagttgtaccatagtttattcaaccagtcccctattggacattttgtttttatcttatattttcccattgcggttaatactacaatattgcagttgctattgcaattaatactacaatctgcatatatcatctaatatttttgccagattatctttgggatatcttctgaaaagtgggatgttaaggcaaagggtaaatgacacttgtttttgctctttttttgccaaattacattccatatggggttgtgccatttttgatctcactagtgctgtggtagaattcctgtttgcccacatgcttgccatcatattacacccatgtgccatttaactacattttggtcagtgacagaccgcaaatatgacagtagtccaataagattataatggagctggaaaattcccatcacctcgtgatggtagtagctttggtaacctcctagtgcaatacattactttttctatgtttagatacacagatacctattatcgtgttataattgcctgcagtatgcagtacagtacaatatggtgcagatctgtaacttagcagcaatgagctatgtggtatagtctacgtgtgtagtataaccagcaggtttgtgtaagtacactacattgttcgcacagtggcgaaatcaatctaaggatgcctttctcagaatgtattcctgttgttgaatgaagagtgactatattttgttagattgttggatttctgtcagtctgatagttgagaatggatatatttttgtagtgaaaatttatagtttttaaaattataagtgaaagtgaactctttttgcatatttagagtcatttgcatttctttttctgtaaactgtttaatcataccttttttttcatctttctattggttgattggtctttttcatctcaattttcttcttaattaaggtttgctggaatatatcaacagatggcctcagaacaaaagcagcttaattgctttgcctaattcactatgattttgccttcctttaaattttccttggtaattccatactatcttgtcagctcttcagtaattttacagatatactttttatactttatctgacattgtcttttagcaagagattgttctgaataacctagcccaccacaactcttaaaatggaagtgttttctttgatttttgaatttttttatcgcttacttcatattttgtttttaaaaataggtaacttatccacattttaaatttttgggctgggtgcggtggctcacgcctgtaatcctagtgctttgggagggaagcaggcacatcacttcagatcgggagtttgagactagcctggccaatatggtgaaactctgtctctgctaaaaatacaaaaattagctgggctttgtggcacacgcctgtaatcccagctactccaggggctgaggcatgagaattgcttgaacctgggtggtacaggttgcattgagcagagatcatgccactacactccagcctgggtgacagagtaagtctgtgtctcaaaaaaataaataaataaataaataaataagcatgcctgtgggttccagctactcgggaggctgagatgggaggattgcttaagcccaggaagtcaaggctgcaatgagccatggttgcaccactgtacttcagcctgggtgacagagtgagacctgtctcaataagaaaaagaataaaagaaaaaaatttatttatctaaaaaattttatatcttttaaagtagcaataattttaattaaaaatgtatttacagtggtagactgctttcataaatatcagatgaactttatttaaaataatgtgtatatttgcttttagtgtttctttcgctgtatttctaacacctatcacatagatcttcaataagtgatgaacaaatggtattcagggaatataaattactatatgacattctagtagtatacattaaatgtggagattaaaaaattttttaacagtttattgacatagcatcttattctacagaatcagtgatcacacattttatgataggctgttttaaaagtattttactttttctgttttttatccttccattgatttctattttaaaatcgtaattattaccagaaaatctaattaggaagcaaatctaatgattcatagtgtgcatattctttaactaaagacatattgtttcatctaatgttaggtgagatactatcatggtgctaattgtgggaatacataaacaagggtgggaatacataaacaggggtggtaaaactacagcctttggaccaaatctggcttgttgctgggccaaacccagccacgcccatttacttactttgtttatggctacttttgctcagcagcaggaatgagtagtcacaacagagactatggcccacagagtaaaaatgtatttactgtcaagccctttaagaaagctgttgaccattggtatggaatatttagatatggtttctgccgtcttggtcagggaaaccctaacccagtggtgctagaggaattaaagacacacacacaaaaatgtagaggtgcggagtgggaaatcagggatctcacagccttcagagctgagtgccctgaacaaagatttacccacgtatttattaacagcaagccagtcattagcattgtttctataaatactagattaactaaaagtatcccttatgggaaacaaagggatgggccaaaacaaaggaatgggtttggctagttatctgcagcaggagcatgtccttaaggcacagattgttcatgctattgtttgtggtttaagaacgcttttaagcagttttccaccctgggtgggccaggtgttccttgccctcattccggtaaacccacaaccttccagcatgggcgttacagccatcatgaacatgtcacagtgctgcagagattttgtttatggccagttttggggccagtttaatggccagattcggggcggggggggctgttcccaacatatcccccttatttgatttgcaaagcaataaaagcaaaggcagttttgtcatggtgagctacttcttgcaggagtcaggatctgcatctgcagactatacaaagacaaacaacacagattaaaagcacaatcatcattgaaatcacagagcttccaactgtttttatccattttaatgggttactagctgctaatctgtctgcagctccttcaagcactccagttcctggcattaaggtcaggtgtacctgggatgctttaaatatttgttcttttaattttgcaatatccaaagacaagtttgtggagtgtccttctagatgcttttttattctttcccaaattttgatcttattaagagccattaatagtttccacaaatccttatgtttagcttctacaacaggccatatcatttgaggttgaggtgccactataccaccgtaattccagatagtaggaactcttgctgtacttcttatcatttctaccatctgaccgttttgttcagaccatctgaacatagtgtgaccgtggcatgcagactgagaggtgcaattcaagctaaacatccccttaggggatcaatcaataatgattccataggaatcattgtgcagcacctctgcctgttctgcaatgcaatctttctaaacaagtaagttcatttttttctggccaggttcaattttgtttacaaaaagatttttgagggtggaatgccttgattatgggagcatttttattgtaaatactgagatcagaaagcatgtgtaactgcgtcatagagtaattacattgaggcattattaccggccaagattgataaatatgcccaataaggataattgttctctgtgtcagcccttgttgaaggaatactcacggcagtggtgatcaccgctctcataactaccattaagttactcattgtgacaggttttcaaaccttgcaaatttttttctagtcccaaaccagggacatacccatttcatgcatcatatgttgactttgagggctatataattgttctggaattagaacttgtgctccgcactgttgtaataaatctctcctccataaatttataggtacagaagttataattggttgaatagtcccaggttgtccatcgggcccttcacaatgcaaaatataaccactttgatatgcttcaggggctttaccaactccaactatgttaaattgagcgggttgaattggccacgtggacagtcagtgctgtagagaaacgattgaaatgtccacttctgtgtctaccaaacctttaaatttctttccctgaatagttatttcacaggtatgacgtttatcagtaatttgatttacccagtaagctgctttgccttgtttatttgtgcttccaaatcctcctgtttgtttaatttcactttttaccattcccacatatggcacaatcaggagctgtgctattcgctctcctggctctgctttccagggaacagaagtagatataacaatttgaatttccccattgtaatctgaatcaatgactcctgtatgtatttgtaccccttttaaatgtaaacaagacctgcctagaagtaatcctgtcgtccccgctggcaagggtccacagactcctgttgggaccttttgcaggggttcctcaggcagaaggctcacagcttttgtgcagcataaatctactggggcactaccggctgtggcgggggacagacattgtacaggggtgagggaatggtctgagctggaaatgccctggtttggaatggggcccaggatgggcccctcatggcgtttcccgaaatcgggttcccatcgtgacactgattagcccagtgttttccttttctacattttggacatatttcagactcagcagttttcttttttcccctatctggcagcctgactcgctgattttttctacattcttttttagtatgcccatgcttctcacagttaaaacaagctccaggaagtggagtatttcctttatccactcagtactgctgttgcctgtgctagcagagtagccttatgcagattacctccgataccatcacaggccttgatataatcgactaaatatgctttcccgaatttaaaaggaaaaggctcaaatgtagctataatatttccctgttgatctgcggggtgtattctaacagggaactgccaagcctctaaatcaccctctcatctaacttgctgaattcctgcctgaataaaactaagagcggttattcaaggcgctgcttgaacagtcactgaggcaactacttttcgcccagtgtcctctggaaaggaaagatctggagggtcaggccactctttttctttaacataataatgaggggatgcagaagggtagacatgaacctctccctcctttgccgctttagctggcaaacaaacctgctctgtaacctcttctgttacttcgttgtactctccttcctcctcatcattagtgtgaaagtgttccaaggtggaacgaaccagagcccacacttgtgccactgttaccctgatgcttctgagctccccttcttactcaccacggggttggctttaagagtactcgagtgtcctccagcttagttccacgttctccaaccgtcgctccggtgacccttcgacctggattcgagcccccgtgatggacgccacttgccaagaccagctcagtgctaacccagtggtgctagaggaattaaaggcgcacacacagaaatatagaggtgtggagtgggaaatcaggagtctcacagccttcagagctgagagccccgaacaaagatttacccgcgtatttattaacagcaagccagtcattagcattgtttctatggatattagattaactaaaagtatcccttatgggaaacaaagggatgggccgaaataaatggatgggtttggctagttatctgcagcaggagcatgtccttaaggcacagattgctcatgctattgtttgtggtttaagaacgcctttaagcagttttctgccctgggtgggccaggtgtttcttgccctcattctggtaaacccacaaccttccagcctgggtgttatggccatcacatgtcacattgctgcagagattttgttaatggccagttttggagccagtttaatggccagattttgggaggcctgttcccaacaggtttcttccctcaaaatggttaatatagaatgggctttccctgatacattctaacagagaagtggctttcttttcatattttaaaattttttttgacaatttaaaagttgtatatatggagtacaatgtaatgtttggatgtatgtattaaatcaagctaattaacgtatttatcacctcacctacttttttttttgtggtgagaacattttaaatctattcttttaggaattttgagatatgcagtacattattattaactgtggtcaccatgcagtgcaatagatcactaaaacttactactcctgtccaactgcaactttgtactctttgactaacatctcctcttttcccaatccccaactcccagcctctggtaaacaccattctactctctgcttctatgagttcaagatttttagattctacatgtaagtgacattatacattatttgtctttctgtgcctggcttatttcactttgcataatgccctctaggttcattcatgttgttgcaaatgacagaattttcttattttttaaggctatatgtagtattctgttgtatatatatatactagatttactattcattatctagtcatccattgataaacactaaggttgcttccattatcttagctattgtcaataatgctgcagtgaacatgggagggcagatatctttctaatatactgatttcagttctttaaatatatacccagtagtggaattgctggatcatatggtaactctatttttagttttttgaggaacctctataatgttttccataatggctgtgctaatttacattctcaccaatagtgtgcagtggttcctttttctccacatcctcaccgacactatcttttccgttttctttttgataatagccattctaacggatgtgggtgattcttatggtattgatttgcatttccctgataaatggagatgttgagcattttttacatatctgttagccattcgtatgtcttcttttgagaaatgtttattcatgcactttgcccattttttaatttggttatttgttttcttgaagttgagttgtttgaattccttgtgtattttggatattagttccttatcagatgtatggtttgcaaatatttaaactttttttttccaaatctgtgggttgtttcttcactctgttaattgtttcttttgctcttcagaagctttttaatttggcgtaatcttatttgtctatgtttgcttttgttgcctatgtttttggggttatatccaagaaatcatagctcagaacaatgtgatggagatttcctcttgtgttttcttctagtagttttacagtttcaggtcttatatataaatctttaatccatttgagttgattttgtatatggtatgagataaggatctaatttcagtcttctgcctgaggatatccagttttccccacaccatttattgaagaaactgtcctttcttcattgtgtgttcttggcacctttgtcaaaaaccaactgaccataaatgggtgggtttatttctggaattctgtcctgttgcattggttgctgtgtttgtttttatgccagtaccatgctgttttgattacaattgcttggaaatatattattttgaactcagggagtgtgacccttttagttgttttttttttttttttttttttttttttttttttttttttttgagtcagagtctcactctgtctctcaggctgttagtgcagtggtatgatctcagctcactgcaaactctgcctcctggatttaagcaattctcatgcctcagcctccctagtagctgggaccacagacacatgccaccacgcctggctaattttttgtctttttagtagagatggggtttcaccatgttggccaggcaggtcttgaactcctgacctcaagtgatcctcctgccttggcctcccaaagtgttagaattacagccatgagccaccatgtctggccactttcctctttttgctcaagattgcttcgactattcagagtattttgtggtcccatacaaattttagtactgtattttctatttctgtgaaaaatgatgccagataaatgcagacttttgtttaaatgtctccaaattttgtcaaacacatattgaacacttaactgtgtgtaaaccaaggattgtgaatgtacgctatgaataagacatggtctctatgcggaggaagtttaaattgaagcatgtaccactgtttagtattaatttgcttttatatcgtatacctgtatattttaaaatagcaatattttgcttgatctttagtcaaaacccttgacatgggaagttgaagagttcctagaaaactttgctttcccctggtttcaaggttcccactgattccacttcgatcttttttcacagttttctcatgttttcaagcagtcctcatcttaatcttaacaagtcatctaactttatggagttttctcatgcccctttaaagccatattgtgacttttaatgttccaaatttgactgacctttcatttactctttgcgatctgatgctatatcctttccaagatgacaccttcctagaataacagtaattaatatatttatatttttaatctttgccttatttgcaaatttaatatctgaaaccgctctctaggatattattgaagaaaaacaaacattaaatattcacctcctcagtatatatctaaacttatccctaatttataatgttgattgagcttttggtaattttgtgtgtataggtgtatgtatcctccattacatacacaaatttgcagtgtgatgatgttataagacagtcatattatagtttttacctcataatcatctttttcttaaagttattactaatatttggtggatttttaaatatatgtatgctatttcaaaaatcttttagaataaataagtaaaagtacataaacaaatagctctgaccttgaaaaaaaaaacaattctttaaaccaactgatatcttcattttgtcatttatagaatccagtttttaaaaactatttataatcttctattttctcaaaattacattataagtaattatctttttattttataaaagcaaaaatgaaccaaatgaaacaatgaagttcttagacgcttttctatttccacaggttgctatcacatacaaagtaagaaatattatatgtattgtatctgttcctttcatttatctttatatatactgggtttctcttttggttttatgccatgtttatatttgatatgtaagcctgattttttttttccaacaatagtaaatgttatgggagactgatataattaggccaactttattattttaatatggatacaaatgtggaagtcggggcattgcatatttttaaatatgttttgaaataacttccttgtttattttgctttagtttttaccagattcgtgcttctatgaaaattccatcaagaattccccacagagtagaagctagtttgttgcatgcaacaggtaagccaaagaatacattcaaatttaaaaagtaatctgaatggtcaataacttttaataaagttttttcattacagatataagatacctgtaatggtataacatcattatgataaccattgtaagaaatatatttggggactcagtgaaacagatttgattacagatactctgtctccttcttagatttcatacaatgagcacatcaaagaatgtatattaaagtttcatgaaaacaaatgtaggattggtatccattatatcatataagatgcaatctaaaaagatacgcagtaaatgggaacatataatttgacttatggttataaaggtgttttatgataaagttttatggtatgcattttgaggacattttttaaaccaattttttttttctggattaggttctctatttatgaaacagagccaaaaggcaatgtaggaaggtatgaaatagacatgttacagcagctttgttagttactcatattctaaggagagacaccagcattaaaggggttaagttaaaactggtggccctgacataattagtggtcatttttcagctttcccaatgcaatatatgctgtttcattacatatagttagaaaatgaaccagttaatgaaacattctaaagagttattatgtaagcctaatatgaattactagtttttaaagcaccataaaaataataaaatacacctaacactagagctatgctgagcataattcagtccattttgaaattttaaaaaacttgttgggtatttgaagtgtttaggattctctttttatcatactatggatactaaaatgttggttaatgttaaattttttatttttattttttattattatactttaagttctaggatacatgtgcacaacatgcaggtttgtttgcatatgtatacatgtgccatgtttgtttgctgcacccattaattcatcatttacattaggtgtttctcctaatgctattcctcccccatccccccaccccacaacaggccccagtgtgtgatgttccccgccctgtgtccaagtgttctcactgttcagttcccacctatgagtgagaacatgtggtgtttggttttctgtccttgcaatagtttgctgagaatgatggtttccagcttcatccatgtccctacaaaggacattaactcatccatttttatggctgcatagtattccatggtgtatatgtgccacattttcttaatccagtctatcattgatgttcatttgggttggttccaagtctttgctattgtgaatagtgccgcaataaacatacgtgtgcatgtgtctttagtagcatgatttataatcctttgggtatatacccagtaatgagatcgctgggtcaaacgatatttctagttctagatccttgaggaatcaccacagtgtcttccataatggttgaactaatttacactcccaccaacagtgtaaaaagtgttcctgtttctccacatcctctctagcacctgttgttccctgactttttaatgatcaccattctaactggtgtgactcattgtggttttgatttgcatttttctgatgaccagtgatgatgagcattttttcatgtgtctgttgactgcataaatgtcttcttttgaaaagtgtctgttcatatcctttgcccactttttgatggggttgtttgatttttttcttgtaaatttgtttaagttctttgtagattctggatattagccctttgtcagatgggtagattgcaagaatattctcccattctgtaggttgcctgttcactctgatggcagtttcttttgctgtgcagaagctctttagtttagttagatcccatttgtcaattctggcttttgttgccattgcttttggtgttttagtcatgaagtccttgcccatgcccatgtcctgaatggtatttcctaggttttcttctaggatttgtatggttttagatataatgtttaagtctttaatccatcttgaattaattttcatataaggtgtaaggaaggggtccagtttcagctttctacatatggctagccagttttcccagcaccatttattaaatagggaatcctttccctatttgttgtttttgtcaggtttgtcagagatcagatggttgtagatgtgtagtgttacttctgaggcctctgttctgttccattggtctatctctctcttttggtaccagtgccatgctgttttggtaccagtaccatgctgtgttggttactgtagccttgtagtatagtttgaagtcaggtagcatgacgtctccagctttgttctttttgcttaggattgtcttggcaatgcaggctcttttttggttccatatgaattttaaagtagttttttccaattctgtgaagaaagtcattgttagcttgatggggatggcattgaatctataaattaccttgggcagtatggccattttcacaatattgattcttcctatccacgagcatggaatgttttccatttgtttgtgtcctcttttatttagttgagcagtggtttgtagttctccttgaagaggtccttcacatcccttgtaagttggattcctaggtattttattctctttgaagcaattgtgaatgggagttcactcatgatttggctctctgtctgttattggtgtataggaatgcttgtgatttttgcacattgatttcgttatcctgagactaatgttaaattttaatgaattatacatagtgtagagtttatcttcctgaagactattaaaatgctcacagaggtctgttgcttatgacaaatacacacacacacacacacacacacacacacacgtatatatacatgtgtatgtgtgtgtatatgtatatatattttgtatattcattcatcttaaaatgaaaaagaatttattcttcgcttggcatacatgtcaatgtatatattattgccataatagatcatcttttgtaagtctactttcacgaaacatagaggtaataaaacaaggtgacatgacatgacagatttggtgtactcttttgaacatccttgaatctagtagactagatttctagctcagttttttctcctgaagttgccagttgagaaaatcctcagattttagttggtgagatatctttcaagatggcaagatacttgacatatattccacaaggttaaatagtctaaccacttttaagtaataaattttaaagatatgtttgttccttattattaaagtttcgagagaaataatgtcaaacctatgaatattaattcattttttttgaagcggagtcttgccctatcgccaggctggagtgcagtggtgcgatctcggctcactgcaacctccgcctgccgggttcaagcaattctcttgtctcagcctcccaagtagctgggactacaggcgtgcatcaccacacccagctaatttttgtatttttagtagagatggggtttcaccatgttggccaggatggtcacgatctcttgaccttgtggtccacccgcctcggctgcgcccatcctgaatattaattcttaaccactaaagttgtccttgtataattctcagcaaatgattgattcaaatacccaaaaggaagtatgctagaagaaaacatttgctgatttcttaatttcagttactatatagtcttacttgtatcaaacccaactatctccttgttatgtcaggcatgatttctccattctttcattattccttttctgaaacaatagatttagaagttctttacatttacaaatgaaacattttaaatcattgagttaatcattaatcatttagcatttctctgtatcatacagagaattgtttctactttgtttttcgcagattccaaataattacctcagaggactggaaattttaactgtgcttggttattacaaatcaattccaagaaagattttgaatgtcagaattattctttgggaataatgactagtggacaaaagtatcatttgaaaataaaatcttattggttagatttttaggttggtgtaaaggatataattaagtgtcacaatatttaatttggttgatgtgtttcattaaagactattttcttcataatgttaacttactcctcaagtgacttcctcttttagtagtaagttaccttgccctaactttatggaaatatttctctacctctgcttattgacttgtgagctcaggataaggaagggcatcaaaaataaattgtgaaaagatttaacagtaacccctgattactcttcctggtccagtggcccttgagtgactgtgcttgctgctacttgtattacagttcagtcaggagcacccttttcaggcgtggtagtggcattatcttggttaacaatagtttagaattatgactctgggcaggaacctcagaatctattcattgcagtgatctaaagtcaggtgtgtcattcagcaacttctggacctttaagaacactttttatcctgataactcagagtggatgctgtgttttaaagaacacagatatactttatggcaacaaggaaatgtcctttctgtgttttcatagcatgtcacatcttacagatgtttttccaaggctttttgagtgttttgtctttagtaatttatgagctaaatacatgactgatacattttctgtcagtgactatttactgcagcaactgagctttcaaatctagtgagtgttcatttattattatatttgatagtgacagggtggtgctacagactcagtcaagattctttccgtacgtagtttcagggcacgaaatcattccgcctttattaggttacacctaatctgtgcattaacaatgtgaatattgtgatatttgtatttagcctcatcttatacaagaaacgtcttccatctgacattttattttccaaatgagtatgtttgttcaacattgtcagttttacctttactcaccagaaaagtggacattttatagctgctcagtcccttctttgtcttttgagagaaaaaaaattctagaaaagataaaaatgaatttattttatggacaaccctatttgaaccaagttccttgatcactattcttcatcaactaaatactggttggaaaggatttatcttctataaaaattaacagaagttataattcaatctctaggtcattggtatggcagaaatattacatataattaatgttatttacaaagtaatgttattttgacatgacaaactgtgtcagaaatgcccaaatagagtaccttctcttagtcttttcctgggtacttaatttttttttcttagttatgtctagatttaatcattgctgctgccaactaagtttctaggttctgatacgatcagttgcatataatagactatgaaatgtagtgatctgatagtttactagtatatttaaaggaaatatcttttaaaaataaatagtttgtggcagacaccagtctataaaagggaagcctgagtttgaaaatgataggcttccatattatataatatgtgaaaatctcacatatgtgaaaatattatctgtgtattttttaatagcattatactagaagtttttagaagattatatacttttagttaaatgatagcagccaaaatagcaagcacaagaaccaaattttggacagaagaagaaagaaatacataaaatctctttcacccttttttctcattctctttcaaaatagcaaattttacctgtcatgtctgaaatgtgctaacaaatatgacttctcaagatctttcatatttcaaatattatatcaatgtattttatttttaattctctaatttatgataacttgtttttcttgtttgtggtttgcaaagatatgtgcaaagcctttccaataaagtggctctgaacaaattgtgagacatgctgtttttctcctgcctgacactattcccaacatgattaccttgtatgtataggtaacaacctttccatagcttttgaatgttgtttcatcctctgggcacctgtggtaaggtaaatctggtaaagtatcaagtatttcatgccagtttaccccagaatagcctctatcttattaaatgttaaattaatatgaatatcatagaggatagtgattgatgggatgtggtgacttatgacatgcgtctcacaagtgttagtttgaaacaaaataatgttcttctgtctagatgcatttcctccccagcagtctgaaaaaacaaggcaaagaaggctgccaacttattacaatctttgagatattgtttctgccttctatatccttccctcaaaatttcatttttcagtagtactaacgagttcttacagtgtgtatcttttcactattagtaaattattaaggaaaggtatccttttctgcctcaagaaattgctcccatgtatttaactgacttttaataaataaatatattgattcctagtcttatccttgaacataaatagctttatataggatgattttcttttatcctttgtgttaattttttacctctgttccttaaaaattcattttttcttttaagggcttggatttttctctatgctttttattacctgctctatttttcttttaactttgattcgtactttcatcttaataccttttccttccagcgctaaattttaccataattcgtataccttctgtatattttgagaaaacttttaggaaaaatagtttaaaataatgatttctgtctgtgagttacagtggagcaggttgagtgggatgggaattagatagtattatacagcttattgccatacatttacattatttccagcacaagattatgctgacagtgagaggttcgagtcaggaaatatctgtcatctgcaataacatcagtcatgaaagacaatgagtatttatagaactgttgaaaattgattggtaagaaaagcattcatagacttttacaacagagaagtcattgctggttttaggaatctggctccagtttgaaatgttatgcagttttcataaaaagtttaaataatgacatcctagtaatgatagtattattaagattaaatgtattttgtttagtttgctttttaatattcatccatctttttttctggaaaaaaattttttatcaaaataatatacagcatatggttaaaagatcaattagtcaccaggcgcggaggctcatgcctgtaatcacagcactttgggaggctgaagcgggcagattacgaggtcaggagttcgagacaagcctgaccaacatcgtgaaaccccgtctctacgacaaatgcaaaaaaaattagccaggcgtggtggcgggtgcctgtaattcccgctacttgggaggctgaggcaagagaatcgcttgaacctgggaggtggaggttgcagtgagccaagatcgcatcactgcactccagcctggggacagtgtgagactccgtctcaacaacaacaacaaagatgaattagcccagaaagacttgtagtaaaaactatagcttgttttctagatgtaacaacttttacccgtgtctctagtccttatggttacctccatagggacattgtcaatggacttcctgttatgataaaaagactatttatcttatttacaccatttcctcgttccctctcccccaaccttttaaaagagatactgttattctcatatgtgtttctgaccagtctctgtagcttcaaacagtatatttaaagctccattttctacttcagtgatcatgacagacttcttattttgaaataaggatataaacagtcccaccatttttttcttctcaaattttctctctttctaccttccaaactctgttggaattatcaaggttgctgacattcatatcctgttttgtaactagttaaatcttttgtcctttgtctattggttggttctaaaggttgaaaacaagtatttgcactttggtggtaacacaagaaggaaagggtttctagaatcgaaatgactatccaacataaagaaggaagatcataagcgtccagtaagacaattaaggcaggtctagttactttggtattgatgtggatcactgttagatagctagctaagaatatttttctgaaaaccgataaaaccatttatgagatgggaaacatgaactagtgtgaccaagagcaagaaggaagaatttaagaaaagaagagatagatagaagatttatctatcgatctatctatctatctatctagatatctattagatttacctagatagatagatagctatcttttttttttttttttaagtagactctcacaatggtgggatctcggctcactgcaacctccgcctcctggactcaagaaattctcctgcctcagcctcccgagtagctgggattataggcacgcaccaccacgcctgactgatttttgtatttttagtaaagacggggtttcatcaggttggccaggctggtctcaaactcctcacctcaagtgatccgctgcctcagcctcccaaagtgctgggattacaggtgtaagccaccgtgccaagcctatagatagataaatcttaatgtagtttagaaactgttaattcagagatgctgctctgatgtagttaacaaaatagtgacttggaatcaggagtctgtcttcctactgtgctacctgggaaaactcacttaacctccttgagcttcagtttctcctctgtgcagtgtattacctgctacacagggttattgtgcattaaataactgaaagtacttagactgtaaagggctgtataccttttatgttatatacctcaatatgttaaatattgagttctagagatataaggaataatggaaaacagtcatgttttgactcattatgctatgaaccattttatgtaaagaactgaaacataatttttctgtgttatgtataatttctattatatagcaagtaatgaagtgcataggataacatttcatgttaataagtataattttaaaatttcatatttttctgaaaaccaataaaactatttatgagataggaaacatgaactagtatgaccaagagcaagaaggaagaactgaagagaagaagagaactcccgaaagatccctaaatttatataatacctcatggaaatctaggtacctgagactgcatttctattcttataaagctagcttcctctgtggaatgtgttttaatttgggcataactagtttcaaatcttgttctgccactcactagctatttggtcttaagcaaattattccatttatttgagtctttctttccttatcagtgtaatagatataatccttctcacagtgtgtatgtaaaaattaagttagaaaattgtgtaaagagatctagtaccatgctcagtaaatgtcttttccctgtgtcttgccctccctttctgtcctaaattgccccagtagttaaaatgctgaaataaggtggactctaggatctcagaaccagcttgatataaggaaaaacagtctaagaaaaagccatttatatgtaatttccttagttttcaagaattcactctatgtgtagacaggttagttgaatgatatggtttaactttttttatagctcctttccatcttttctctccaatgagatagctgttccttactagtgttggagttctgtggtgtatatgagagaacacatatgtttgaaatagtttatcagtgtgacattgacggccaagcacaggctgtggcacaaacagctgtggcatttgatttctgggcagattatcagaaccttggtgtctgtaaaatgtatatattaatccctacaatataaggttgccaaaatgattaataatgatttccataaagcacagtgcccagcacacagtatttagtagccagtattagtactaataagactgaaatggagggaaaaagggaaatttcacaaaaattcaaatgataatgtgtggggaaggtcttaataaaaaaaagttctccattttgatagaagctttacaactagataagcatttagacttacaagaaatcagcccaggttggttaaaaaaaaaaaaatgcagctattggtatttgaccaggttttttctaaggccacttctctgtcttggataatattttttgtgtgtgtatatatgtatttcatttttcttcctatatgctactacccagcttttaggtaggtgatagcagtttcaaaaagttaacatcaaggagaaaggaaggctggaaataagggctagttataaaagtaaggaaagattgtcccagttactttattttggcagtggttaattagctacttggaataaagcttcaaatattctgaagtgctgttagcagaaccatatctttctcctctattagttgtctccttaagctttgctcagccaccagcttttcagggccttcctttgagagccactgaaatgttgggatagttctgctgtgttaagattttttatgatttgatcctatcctacatgtcgaattttgtttcccaccattcttgtggattcaatggaactactttcagtttctcaagtttgatgggttctatttgctcatattttgtgcatgctctcctctcttctccttattacctcctttttaaaaccgtaggtaactcccctaagcagttagatgtttcctttgccttgctgtcatagtcctttttcttttttttgagatagggtcttgctctgtcacctaggctggagtgcagtggtgtgatcatagttcactatagccttgaacacctgggctcaagtgataatcccacatcagcctctcaaagtagctgggactacaggcgcatgccaccacactggcctaattaaaaaaaaaaaaaaaatttgtagagacgggagtcttaactgtgttgcccaggctggtctcaaactcttggcctcaagcagtcttctcacctctgcctcccaaagcgctaggattacaggtatgagccaccactcctggcccatagcattttctatgtacctcttttagcttatgttgttataattttttctcagaaatgggattctactaaaacaaacatcaatcaccattaaagaacagtgctttaaaaaaaaatgaggaaaagttaaacatatagctagagacatttcatattatgtcactaatcctttactgttatcagtaattgaataatctcaacagccataaatggaaaactcaccataaagttaggtccttgaattaaactgcatagattacaaaatggaagtcatttggcaagcctccattttgctttcctcagattcaacagcttctatcattgccctttaattgtctttttacctggtttaagagatagtgttagattgctatttgctttggcctgctgaaataggcagttaagagattatcacattgtactgcaattatttatttgaatgtttctatccaaactagactgggagctctgaaagtgggcagagttcttacttatgttcatgtcttttacttcccagtagttgagagacttaataaattatggttgaatgaatagtcacttggtcacaaagtaaatgaaagataccagtgctaacttttaaccaaaggaaacggaaatgcagatagtgatagaaataaaatataaattatcatgattgaatgtaagcatttagaagcctctaattatctcaagtctttaaaactatagatctgaatgtttgtgttagcagataactgataggcaaaataaaaatcaagtcatttgaacaaggaaataggatattaaattaagaagttagacgaacattcatttattaaataaatactttatgactgcctactatgtgtgagacctaagtgctcagtcctaaattaaagcagtgaaaaagattaatgtggtttctgacttaatggagttgttatcatctagcaaatattagaaaacaaagtttcagattcaagacagtaatcttagcatacacgtttaggtcttttgtttcccagacccttcagtttgataataacattaaagtgtaaaaaggaataacagaacaatatttcagttatttatttttttaaatttctttctttctttctttcttttttttcttttttttttttttttgagacagtctcactttgtcactcaggccgaagtggtgcagtggtgtgatctcggctcactgcaacctccgtcttcccagttcaagcgattcgcccatctcagactcccaagtagctgggattataggcatgcaccaccacgcctggccaatttttttttttttttttttttttttttttcagtagagatggggtttcaccatgttggccaggctggtcacaaactcctgacctcaagtgatccacctgccttggcctcccaaagtgctgggattataggcatgagccaccacacctgacctaaaattttgttatcttgaataactgaaattctataccattgaacagcaactccccattttcctaccccctgtcaacccacattctgctttctgtttctatgagtttgactgctttatatacctcatataagtggagtcatgcagtatttgcttttctgtgactggcttatttcacttagcataatgtccttaaggtttttccatgttgtagctatgacaggattttcttttctaaggctgaataatattctttaatatgtacataccacactatccattaatttgtagatagacatttatgttttttctacctcttgactattataaataatgcttcaatgaatgtgagtgtgcaaacatctctttgaccctcttttatcagttcttctggataaatacctagaagtgagatgctggattatatagtagttctatttttattatttttattttttgagacagggtctcgttctgtcatccaggctggagtgcaggggtgcaatcaaggctcactgccctcgacctcttgagcttaagtagtcctcctacctcagccccatgagtcacatatgttttgtacatatggagcctaactttgttgcccaggctaatcttgaactcctggactcaactgttcctcctgcctcggcctcctaaagtgctaagataacaggcgtgagccacacactgtgtgtggccagtcgttctatttttaattttttgaggaacccccatagtattttgcacagcagctatactgtttcacgttttcaccaacagtacacaagagtttcagtttctccacatccataagtgctgatcatgttcataatactaacatgaagtaagaaataaatgagacaaggtccttgccttcgagaaatctccatttcttcctcctgaaaggctcttcccttttatcttcatttgactaactctttttcatggtgtttcaactcaaatgctatgttgtcaacaaagcctctcctggtttcacagcctaagttcacccccatattgtaagatgtcatagcactctgtcttctgtacacttagtgtagatgtaatttacagaattaggtgaggtcagggaaaatggttggtttttttgttcagtccacttagctgagaaaatccatggcacaaagcagctatatagtgaatgtgtaactttgcattatgaaatatattgcacattttttgacgattacataacacagtattttattaaataataaaatgaacacccaggtacccaacctttcatttaagaaatagaacattactagtactgtaaaatcctcctgtatacccctcttgacgtttgtgttattcttttgctttctttatagttttatcattatgagtgcattttgtcagtataactatattccaaggaaatatctggttgagtttgaaaaaaattgagtggcaagcacaaacccagctgtgtaagatagcataaatatcgctattattaaaagaagtctcccagaagaaaagttgaacagagtctctgggttatggtatgcttctttatacctgaaaggttttaagactccctttggagatgttcgtgggcaaggtcaagagtgaattgtgtaaaacagagtttaccactttcagggcttctggcaagattgtaatgtgataaaatattggatatctaacatatggaacagactgatttgcatctgaacttaacattgccctcctccaactctcaggagcaggccaaagcagaaaacttcagtgaagtgaaaatagtatcatcagatgatctaggctagaaacttcattagtacaccttcaaataagccaagcactgaaaagaaatttagccaagcttttaatctgtcctcaggttaaagttggtaccctagcagcagggatgttaacatatcttttatggcacacaaatccgaactacattggtcactgtagattagctaaggaagaggatctgtttgggatcttccttcaccatcttcctaggcattccctttgcatctcttctatgttgaatctcttatttcctaacatctgttttttctctttcttggtttattctctcagtttcgtagagcctataaatagttaacttgttgagaaaagtggcatgggaaataaatattttgaagccttcagcatctaaaagtcttttcattctacccttaacagttatttggaagttcagctaagtatagaattctaggttggaaaccttttttctttggaatcttgaaaatattactccattatcttttggtttgcagcattgctgttaagagttccaaagccattctgattactaatcttatttttttctccaaaaaaaaaaatgactgatttttaatcttctatgtgacctttttcccctttcaaaaatctggtagaatatcctcttggtaactggggttctgatggcacataatgctgtaccttgggtctttgagtacttcagttctgagaaatttcttaatttgttaacaattatctcccatctgttttctttgttctttctttttggaacttcttttgtttataaggtggatcatctttactggctttcttaagttttagttttttcttctcctttttcccgttctcttcttggctctactatgatatttcttcacctttatttttaacccttttttgagctatttgcttttgtgctttctatcttttactctcttattctctctcccactccctttctccttcttttctccttttcttctctccttccctctctctcatcgcttctctcttcattttaaaatccaagtgctcttttgtctgagtgttcctttgctataacaatgttttcctgtttcatgaatgtaatatcttctctaagaacaatattcttcttttttaaaaaaatttttcgtatgttactttttttctctttgttttagtctctaacttaaacatgttaaaagtgtccttctgatatttgataggcctcagttgtctaaacatgagtgaaaggaaggctgatgggaaattctgagagcctgcaggggacttgtctgagcctcattttagggcgatggtgagccatttgtctaaggaatctttgaagtcagtattgatagttatttttcattgaattcattagattccccatgtcaagaactgtgaagaatctgagattatactgtatatatcactgagaattcttctctatggtttctcatgtttctgagaagagagaaacattttatgagcagagacactgaaagccttctgtttaaaaagaccatctttttaaggatatgtgtgcaatgaacagctttggaagttatagacagtgtctctgtctagaacatacagtacatttatctactttccaatataatggacagtgcaaaagttacataggttttcttatagctacccttataaaagatagaggtttcctaagcttagggttcctcaattgtgaccaaaaacccaccacatacatggtatccacctggcctgcctccatgtcactcccatgggacttggaagagtgaatacaagggaaactaacatgaacaggaagctcatgctgcttgctatgctgtgcataatcaaaccttttgtctttgacccaagagtcttgtgtcttctgccaacatatatgaaactgtggcagactagcttgttaggttgcaagtttggtaaaatctaagattttacagttcttgaaatgacatagaagactcttgtctgtctccttcctagagagtaagaatctagctgacagccttctaggagcccagtagagaacaattctgatctctgcacttagtattcaatatgcctatgctcgtatattcatgctctctcagttttgccaggtgatttttagttcagaggacttctattctcttcagagaataaacttccagacttctgctagggtgaaggaggggacagcgacctagtggcctgtagtaggggaaagaacacaggaatcagttttcttctttgctgataggttcccttctcaagaaagcattgcctggcttttctgtttaaaattactatctttcttatccctcttttcctttctttatttttctccatagcacttaatgcttgtaactttcaaatgtattctatcatttacttactatatttattctctatcacaccactccgttaggatgtaagctctatgaggtcggagatttttatctctttcatttaactgtgtatcccaaacacctagagaatacctgatacataataagtattcagtaaatatttgttgatcggatgagtgaatgaatgactaggaagttgcacatctgttgcctgttgcttctggtttgagaataaaattaagatgaagtttattatatgtaagtcactggtatttcttttttaaagcttaaaatattgatgtcagttgaggatataggcaactttcactgaaatcattcacagcaatttagaattactgattttgtatacaacttcttatctggcatgagaattcctttagagcattcctaaaggcagccttcttttttctgtcagatcatttttagtattgttggtagaaccagtgggtttactgaagaattggttgtgaggcatagaaaagaagaaagaataaagttcacagatctagtaagtggcagaaccaggactaaaacctagccagtctggcttcacaatctatgttcctaaccactgcactatgctgcttcttgatgagaaaagaacagcacccccaccccctgcaaaaaaaagagacgaaaaaggggtggcccatgaggtaggagtagaactaggagagtgtgatgtccagaaagctacatttaagaagtgtatcaagaatgagaggatgggcaacataatgagacctcatctctacaaaaaataaaaaataaattagcttggctgaggtgagaggatcgcttgagccctggaggtcaagactgcactgagccaagataagtgccactgcactatagcctgggcacagagtaagactctgtctcaaaaaaaagtagaaaaaaaaacaacaacaaaagaacaagaatgagagaatgcatattatatgatggatcatagtatctatgttagatactgattataagtcaagtaagatgaggtttgagagttgacctttggatttggcaaaggagaaatcattagtggttttgataagaacagttatatgggctaaagtctgattggagtatgaattattgctgtgtaaaaatttatcccacaacttagtttaaaacagcaaacattatctcacagtttctgtgtgtcagaaatttagctgcatgcctctgactcaggatctctcattaggttatagtcatttacttctgctgtattcacacaaatcctactattacttctttttttttggagatggagtttcaccctgttgcccaagctggagtgcagtggcacaatctcggctcactctgcaacctccgcctcccaggttcaagcagttctcctgcctcagcctcctaagtagctgggattacaggtggccgccaccacacccacctaatttttgtatttttactagagacaggatttcgccatgttggccaggctggtttcaaactcctgacctcaagtgatctgcccgcctcagcctcccaaagtgttggaattacaggcgtgagccactgcacccagtccctactatcacttctatcacatagatcaaccctggtcctttctaggagattgtgcaatagtgtgaataccaggaagagaatcattggaggccattttagaggctggctatcacacagtgagctgaagagagaatgggagatgaatcaaacacactaaatagcaaagacttttgagttttgcctgaaaagggagcagagaaatagggagtttgtctaggtgcatctgcaggtagatcctatagtagagcttatagaacttctgattatttttattttctcatgaaataagaaacaaatttatcagtgagactgaaggctaggtttgaggagagaaaataatttatgaaatagtcatctaagaatatggggataaaatggatttggaaaatacggtatgattgctaggcagcactaaagacccacttgaaattaacggtcatgaatttaaagtatagccagtcaagatagctgtttgtttttctccaggcacattcagtttgtgggtacaagtgtggattgggcagagagctggagttgggatttatccaggtcaatatgacaaagcaagggtaacatatatccttaatagattatatgcaagagtgtattataatgatggatcataggatttaagatgggtaaggaaaaaaggaattaagagaaagtaaggggataatgaaaaggagtagggttcatggaatctactcctaaatgtggtcaaaggattattgaatttgtggtcttagagggtatgaaccagaaagacaggtggaagtatgggaggagaggttgattgaaattcacattacaacaaacattacacatgttctcacttatgagtgggagctaaataatgagaacacatgaatacatccgggggaatgacacaccctggggcctgttggaggatagggggtgggaggagggagaggatcaatcaggaagaatacctagtggatgctgggcctgataactgtgggatgggatgatctgtgcagcaaaccaccatgcacacatttgccagtgtaacaaacctgcacatcctgcacatgtacccttgaacttaaaagttgcaaatttaaaaaaagaaattcaaattacagatggattgcagtcattggtaatataaaagtctggagaatgatcacaggagtgaggagctgaggagggttagagagcaagaacgcttaaaaagaggagaaaaggaacccaggagatcaaagattaggtttacctacatagctattgagttcaccaacagttatggctagactagtttttgaaaaagtgatcttaaattaggaaataaagccttcaagaaatgaaggcttcccagggtttatagagtacaaaaatgagcaggatagtgagtggtactgtgctgtctgatcacaggagattcaaagccagtggtataagtggttttagggaggagagacaaagagtgtctcaaagcatcagtaagcaacaaagaagctccagacccagtggtagaagttatatggaagtattgagagagatgcagcatcttcagggaagagcaatagagaaacctttgtttcttcaggcagtggattctcacctcacgttacctgggtgctctcaacaaaatttactttcattgaggagaatttctttcccttctcagctcttcaacatactcagaagttgagtttctggtctgcttggtttccctttaagtatatgtttcccgaagcatctcaaacttaaagaaaagttgcaagtacattataaagaactttttttcctgaaccatgtaagagtaatttgccaatatgattgctccatcatcccaaatattttagtgcattatttttttctaaagaatattctcctgcataaccccaatacatccatcaaaatcaagaagctaacactgacacgttactgtcgtcttatccatagccccattcaggttttgctggttgttccagtaaagtcctttatagcaaaatgatccagttccaaatcatatattgtaattaattgttatgtctctttagtctccttcatcctagaacagttcctcagtctcttcttgactttgatcaccctgacacttttgtggagactacaaacctgttattttttagagtgttcttcagtttgcatgggtttacaatttcgtcatgattagattcattttatgtgtttttgacaggaatatctcagaagtgatgcttgttcttcttgttacatcctattaggtgatacgtggtttctatttgtccaattcctaataatgttaacttggatctcttaattaaggtgctctcttcccagcttctccgctgtaacattactctttttcactttgcaattaatgtctcttgtttcttaaacttcagattttttcattcacttatttatttatatcagtatggacttacagatttctgtttactcaatggatgttaatctattactgtcataatttattttgatgttcactttgtcccagatatggccggggcattctcttccagctagcttctatgcccttttgttgtgtccccacattctctaatcacttccttactttctggtataaaaaagatggtccagatttgtctgtgcgccagctttggaaccaaccatttctacaaagctgtggatccttttagtggaggatagtactaaagactaacatttgtggttgtgctactcccaggccatttgagtggacaaagatagtaagtacattatatacaccatacacttacacatacatatgcaaatttacatgtctttatctaaatatctgatgaaaaccataagttcatatcagtactctcagtttcaatccagtaccatgggattcattctgtatttgtgtctcctttccatatgtgtacatcctttccctgataggtaaggaaactggctccccttatcctttaatatatttccttatttgatcagtcccttatatgtgccaatctcctgtcactgcttcttctcccacacagatggtctccttgaactagttgggcttcaccttatgcaaggtcactcccttatgtggacctcctccttaccccacttgacctcagtaaggccttgtgccaggagttccttttcctcacttcacttggattccagtagtgtgtcaagctgctgctgctgcccaccgccttcttgactcccacccccatatgaagtctttttatccctttcagattcctacacaccctgtaccaggctgctcctctgtaaagacgctctctccatctaacttgtgttccaaccccccagcctgaggtgccttcccttgtggttgccctgttcatcctgcttgggctcccaataccttactcaaagtcaccgctgcacttagattgcctcctcatcctgctcaggttctgacactttactcttggctgccctcctcactccacacaggctttgacatcaggccaccaccccatgtggatttcatatgggcgtttggaccctgtgctccctggcctgcagaggctccctgcctttgactgacatccaccagcttatgttgacatcctcatgactccagttggagtcttatatcccattttgagctccaaacccaccttgatctctagtttctttttctttttctttttcttttttttctctagtttcaattgttatttctggagcacagggtaataagatcataacagcaggtaggctgttggagtgacatcaatgacccagagataaaaaccaaacttcaaatggtaaggacatagtcctccacaagactcccctcacgtcagccatgagtttagtggtctgcaagctacccacagctgtgaagagctggctacaaatctgggggttcccattattccctcatgtttgataattcagtagaacaactcaccaaactcagcatagtgctgtacttattattacagctttattacagcaaaaggattcaaatcagaatctgtatagggatgatctgagagggtcccagatgtgaagcttccgttgttttctccccattaagtaaggacgcattaactttcctcctctcgaacatccagtatgtgatgatatgcggagtattaccaaccagggaagctcactcaaacttcaatgttcagaatttttattgatgtttccttatgtaagcatgactgactgaatcatcgcccatgtcgctcagtctttagctattctcccctctctggatattgaggttatatcactaggctcaaagcgcaactctctaatcacatggctggtcttagtgatgtggccagcccccatcctgagtcatctctttagcataaactaggggccaccaaggatttagaggctacttctcagaaactggagacaaaggccagccaaattctttattccaagtgtttagagctgaactcctagcaaccagtacaaaggccaaccaaattctttactattcagctatggaaaactaaattgctttcctaaatgtggtatacagatcagttgttcactctaaaatttctgcttcgatatttcctcatttacctttcagattaagatgtcatgcagtaattttacaatgctcataatgtacttatttattttctaatcatagaaataagtaaactttcagaaatgttccaatactgcagtataaattgataatgacactatagtaatataatcaaacatacagtattttaaagtacaagtgttaatttgcttgtgttatattttacttttatctgtcaattacatatcttatctgttttaggtatgactttagcctttccagcctcagttcatgattctctaatttgcagtaaaacatttcaaattttgtacaaaaatgaagaggttgttttaaatgatgttatgatcttcaaagtaaaaatgctattggatgaaagaaaggtaaacatctcttcatatttatttatgtaaatattttttgtaatgcctcaagatgttatttctaactttctataaaatttcaaaaagtatctcatagtgtaatttcttttcagattgaagaaacccttgaggaaatgaattttctattatccttggatctacacttcacagatggagattattcgtaagtagctaatcaattaaaaaacctttaggcacttatgactgttatttgttattattagattgcccattttcctcttaaaattcatcctatccctatcttgtcttgaactacttgtgttttctggggaaacttcatgagaatgattaggccagctctattgtgcccatgccgaatccatgagctccagataacaaaaccagacaagttaaagaaatatggaacaatttttcctagctcctagaaattgcactgttaatgtaataccactaccgtgaggcatttaaatgtaaatgagctcttttccactgtatcactggctaatctttcttgatggcatcagttatgctttctttaggtaggactttgttgatattctgagagttatcaagactgacgatgtgcacttgacagttgttctagttcattaatttccagagcccttgaggaagttttaggattggctacctccaacttacccacatacctggacatgcagtcatatgttttaggaacaaattttgcttgtgttcatttaaaacaagaatcagagattcacttaacaattgtatttatgcagggttttttcccccatctcaaatgtagttttagcaataattctcaaaaatgatatataaattcagactgcatgtgggataagtaactaaaaagtcacattactgaaaggcctactttagatgtcctcttcactatatggtagctactgttcctctgtaatacttgttcattacaaagaattttgtaaagtcttttttttttcaccaagtcagaattatttaagtggaataagctgaaatgagtaggtagttcattacctgtagattgttaaaatggatggatggaatttttttaagtataattggatataattttcatggcattgtttcacatttttagtgtgtataaatctaatgatatactaaatatctacaataagatatgttttactttttaaaataagcaatggcctgcttatttttgagtagcacttaataaaattttgtagagtaaaagtaatttgaaatatcctttgggatttattataatagtatttgacctatgttgtactgcagccttgtaataaacagtattctctatggggtaaaattttaagatgagattaattcctgaagtatcaaaaaggattcattttatagggatattagtgaaaaaatagttcatatcatggactgatagaaaacaataataggtgggatctgattattttctcaattggtatgtttcatattgcttctaatgcaactttgatgctttaaaaattactcttattcgaaatttttaaaaagtaattaagtaaatagtttttatagtttcaactactttataatatattggcgtttactaaatgtttcatacttacatgctaagtgttcctttttacagggcagatgatctgaatgccttgcaactaataagtagccgaacattgaagctgcactttagcccccatagaggccttcatcatcatgttaatgttatgtttgattacttccacctttctgttgtgtctgttacagttcatgcatcattggttgcactacaccagccactaataaggtaaatttgactaatatttttgtattaagccattcttacactgcaataaagaaatacctgagactggtcaatttataaataaaagaggtttaattgggtcatggttcttcaggctgtacaggaagcatgatgctggcatctgcttaacttctggggaggcctcaggaaacttataatcatggcagaaatcaaagggggagcaggcatctcacatggccagagcaggagcaaaagagtcaggaggagttgctacacacttttaaataactagatctcatgagaactcactcactatcatgaggacagtatcaagaggaatggtactaaaccattcgtgagaaatctgtccccctgatctaatcacctcccaccaggccccattccaacattgaggattacaattcaacatgagagccttattaatgtagcatttttttatttttatagtgaaaacgtgtactttgctaaagataactgaaataatgacttttaaaatttataataaaattcaagagtatgggaaacattggcttgataacttttttattacagaaatatgaagccatctttgtcaatcccaaataagttaacaaagaaaaaataccatctggaaataaccacacaacattgtttattctgtacctatgttttgtgcaatgttaaactataattactctggaaaagtatgtgaattttttcttattttttctttgcctcttatccagataggctaattttatcttcttaactgtacatcatacagtgatacttgctttccaagtcattaaccaattttatgaatttttactcaaccttttaaaactatatcatgtaccattagttcaaaggtatataatattctggatcataataaatgcattgagataattatttttttctgttcacttccatgggtagacagatttctttcattaaagtaaaaatacaatgcaaggtcttcagtttttacaacatcatccttgtagtatgggcagcagatggatgcttcaaatcagtaaattatatgaaagtctccaattttatttgatttctaaactatctacaatttctgatgtacatctgattctgacaaatgatattgggatgatgcttaagggatatgatggtaaactgatttatcagaaaactaagtaaatcattttgcaaaattaccctcagaatttatggaagcccaacacaatttaacatattgaccacaggtaataacctcctatggcatatctttacattgttttaaaaactaattgaaaacatctttcattctgttgctctctcatctcttacatgtagatcaccttgacctagttccttttagagcaccaggccaggaagacatatatttctcctgatgacttgttttgccttctttattctatagaaagatctgtaactggtagttttgctgtctttttcttacctcctaggcctttgagaggtcgtgctaagttattatagcttttataagcaggaaggtgtttttttattacatacataattttattataaacttaaaatttttttggaagattttctgaaatagaatgtgtgaatgaaacttttctaacaaagtgtgttttttgaaatataacttttaaataatatacagtattgcttttatatgattttgtgtttggttttaatgctaaatgtttatctgtttataaaatgtattactctagttttctaaatctcttctttttgtagttttaagaagaacccctaattaaattgttttaactatttctttttaagatttaccaagattatcttcataaaactagctgtgtttctttcctgcaaaatgcacaaacaattcataggaggttagctcaggttattaatgttagtttttaaggccctaattaaacagagtagatattcacatcaccatcgtagtgagttaaatacgtgcttcctcttgcaacgcagcaatttttgccacagactaataggagaaaggggcagctcatctcctagagaccatttactggaagaagaaatttttggctcagaatcagaagccaggaggattaactgttggctctggttagtgactagaaaagaaaacaatatgcctgtaacagctgaggttgctgttctttatctagctgccatgggcccttatatctaacactgttgctgctagaacttcgctgtaaaagcagcagcatctttaccagcctttctctacctataaatgaaaggttggaaaaggaaagcaaggaaaggggaaggggaagctttttgctggtggtgtgttgataaaggggtcatgtctaagggtaacatttcctactctatattcttcaacaggtttttcctgaagttttattattggtgggtttttttatcctccaatcattgaaaaatttttaatttataacattatcttttaaattttcatttttatttaaaacaatttttatggtcaatgcaatctatagacgttatatcagttacttaaagtaagtggcttaggatttctttctttgcttgctttttatttgaactgtttcttatatttgaattttttaagtacaacttttatgacaactctgaaaaacacattgtatgaagtggaatttaccacttatttgagactcccttctttgctgggatatagacattttacttttgcaaagcaaatggattttgcaagcaaaacctgcactctgcttatggcaacattatttttcttttctgtcttttcccttttgccaaactatcgaacagttcaaatgctttggcctactttatctcaaatataattgtgtatgatttttcaacagtttaacagaaatatgcttcttcctctatggaatataaatgttaatactaacagaagtaattcatatagtatgtaattgatggtgccttgaagctggaggctggaggattgcttgaggccaggagtttgagactagcctaagcaacatagcaagacctcacctctacaaaaaataaaaattagccaagcatggtggcacatgactgtagttctagctgctagggacttgaataataaaaattattttaatagagcttatagccttttagtaaagagaattaagggaaataaatttatttttgagaaatagaggcatcaggtagatttagtaatttttctttttctacatttacatgggagctctttatttctgggaatagcattcatatttcattaagtgttaacactgtaaatttggtaaccagttctgacatcaggatttccaaattcaagcttggctttcatttgttgtttagctactctaaatcccaccatgttttatctttgatgttctttgagacttccagaagtctaattatagcaagcaatgtcaaacatctagccctaattttttaacattcattttattttttcatgattattcaaattattttttaaaattactttaggagtacttttgaacttataaacttgcaaaacccttgctgttctattcctgtaagattttcctttgtaaatatttaacttacattcaaatagactcgtatgacaataataatgtaatacttcttcctccagctttcctcgccctgtgaagacaacttggttaaatagaaatgcaccagcacaaaacaaagattccgtgattcctactcttgaaagtgtggtctttggtattaactacacaaaacagttatcaccagatgtaagaactgaatatgtttataaatcttctccttattttaaaagaagtgtttttaacaattttatctgtgaatgttatatttcttttttaaattatttcagctcagcaacttatagatctaattaaatatgatcttaaaaattgtttggttctaattgtctattatgaaaactaacatgatacttcaaaatgttaccagatttagtggatagacatctgtgacagcctgtgccctttaacttgttactgtcaccccttggtccaacaactggtagaatcattccaaaggagcctttaaagaacaattgacagagctgagacccagcgtagagtagcgcaggccaggtgttgtggctcacgcctgtaatcccaacactttggaaggcttagcctggaggattgcttgaggccaagagtttgataccagcctgagcaacatagcaagaccccacctctacaaaaaataatggtggcacatgtctgtagtcccaactgctagggagcctgaggcaggtgaatcgcttgagcacagaaggttgaggctgcagtgagctgcaatcatgtcacttcactccagcctgggtgacaaactgagaccctatatctaaaaaaaagaaaattaaaaaaaaaaaaagagtggtacaagtacagctattattataaaagaaaaggggacatactataaaagctgaatgtctgtccttcagtctaaatgttatataaataccatgctatcaaaaataataatttaatctacttgttataaaaacccactgtaacagaaattactagggccacatttcatgtttaaatttattgtataaacaactctcaaatattaccacattttttatatgtattagaataaatttagttgacagatggttaagtattttttctttatttttccaagtttcacatgtaacattttgtattactgacactctgtatcctacatctgttttttgtttagggttgtagcttcatcattgcagactccttcctacatcatgcgtatcgttttcattatacactttgtgccactttgctgctagccttcaagggattgcacagctacttcattacagtaacagaagagattccttcttgtcagaaactagaactgggtatgttaaaagtagcgagacttattctacagttcaaatcattctcttcagtcttatattgctagctatcagctttgccatagtttttctatactaaaactacagtgtttgtgtgcttcacttctctatcaattccatctttttctaccttgataatcactttttgcaatttaaaagtgtttttcagaatactaaaaaataacttcttggtgctaaatgtgaaatgagtcttttaaaaaaaacatgtcagtaatctgttcctcttaaaatataacccaaaaacatgttagaaagcaaatgtaattatctgcagaatcataggaaggtaaattaaagccatacttccaaatattttacagtctaatcagattgtaggtacttagggcatttttgtttacatttgattttataatagttatctcagatctcaaattccttttatattgttttagggaataataacattacttagtattttaacattttaaaaatcattgaaattgttttaaaaaatcaaacttcaggtttcattcaaaagtaatacctgtatatatttgtagtgcataataaaaaatcatattgccttgattttgtatgccatttgtagcttgcaaaatgcttttacatacattatttcacagaagataaattattgggattggcaaaataagttcttattcagactttttatgtcagttttattagcttttattttcaaatattggctaatagcttataaaaatatattttaatttctttagaatatattgttttataagttttttaataaatcataaattgccttttaaaatttattgaatctgtattcttactttattcctttgttcctcaaggatttcagtcttttaacaatattagtccactccctaaagtagtcactgttccagaacatagttcttgggtttgagactaatcagactacttaaaaacttgtgtcggattacagaggaattgcaagaaagtgtaagaatttctaccccacttaaattcagctgtgagaaaatgctggctattgtgccactatcagcaactactcaagtgcatttaattaattaattaagtccactattcagtcagttcaactcacacttcttgactagacatagatatcactaaattgactgtttagaattcttgattcagtaatcctaatggtttcatagatacacaagcaataggaaaatgtgtttattcttttttgaccatgtattcattctcaaaacaaaaatggtagtgtggaaaagacaatcttctgatcattattctctgaaacagtctctattttccttgctactttatgttcttagaattcctgtttcccttaggaaaattctatagaaggccactacctcaaatgtaaatttttaaaaatcttcttttgaaaatgaatcatttacagaatagagctaatttaggctatcacttatcctcaattaatggaaagttatgtttcaaatatctttattggtggtttggaaatcaaaaacaaattttagttagttttaatgaccagaccacaaaactattatactaacatattaatgaaggacagtatcatgtgcctgaaaaacagtgtgatgaaaagtagtgatgtaaagcttaaaatccatgtgtaatgtcatttctacaaaaaaacccaaaaacatgtgttaatagctttgatgtggaatactacagtagtttcaaggaggcattatcttatgttcaagagtgcacatttggaaccatttctgtcacttacttactttgagcctacaaacacaaagtggtttccattcacatggtaagaagattgaagggaatcagatgtggtacatgtgtcaggaagcaaaggtgagattatccaaaagaaaaagggtgtaaaggatctctaggaacaatacttcttaacagtgtacttcccttgggcttttaatgagcacctcctgtgtcagttactgtgctaggtgctgaggaaagaataggtccctgcctttaaagaactttgacttctcctgttccctctcctctcacagcaacagtattaagaaatcagctcagcattgggatgggaaggagaaattcacccagcaaaatggggcttcaatatatgagatgggcttataaattacctgtataaggaagatatccatctgcatgtaatattaaagtagatttaacatgtaatatttacaaagaaaaacatatgaaccacattttaacttagaaaaaaatcctctctaaaaggtagtatgtttattggtaaaatttataattagtaattaaataaaaacatttctccttttaaaggcaaatatttatttcaaatagcttagaccagcagtccccaacttttttggcaccagggaccagtttcttggaagacaatttttccacggattgggggaagtgattgttttgggatgaaactattccacctcagatcatgaggcattagttagattctcataaggagcatgcaacctagatccctcacacgcacagttcgcaatagtgttcacgctcctatgagaatctaatgccgctgctgatcccacaggaggcagagctcaggaagcagtgcttgctcgcctgctgctcacctcctgctgtgcagtccagttcctaacaggccacagacaagtaccagtccacagtctgggtgttggggttagacagtgttagcaattattattaattagtctagcttcagcatgatcatgtattcataagattttcaactttttctctggtgaggatggcttttatgtcatgtatattactttgggcttatagatgtaatatagaaagtatcgtaataaaagtgcccttatatttaatttcagaagttaattacagaatgaatgtcaactttattccaaattatttgcttaaaatattttatcagaaaataaaattctaaagcaaacccagacttcagttttaaataagtatatgatagaaataaaattactagtaccttacacatagacttacttaaaatatatttctcgaatgaatgaatgaaatagcacaatacagttttcattgttacttgaaaaagtataggcatcaacataaagcttaacagtttcctagggatttttaaaatcaagattcatcttcagtaaatattggtaatatattgtggtgttcttaaactttacggtttttattttcctttctctttattgtgaattttagtttattcttgaatgcatcctgtaagaaaacatctaaaaatactattaacttaaaaataaaagtatttgttacatattctaaactatcaatgtcttttatttttattctagcaaaataaaattgtgaacactaatatatttctataatgtactattgaccaaacaccactatattcaccagttttaataagtggatacagagtagttcttgattaaagaatatttccttctattacttaccactttcattgagttttcaaataagcatatatttaaacttcttaaacttgactatgctttgaaaacttttctaaaatatgttccctcttttaaaataacgccttgagttcctttcggcttttttgcctttctcttttctcccagatgaatgatgtacattttctgatgacatataattaaatattggtttggtgcagggagctcttactgaacatgagagtcaggagttctggaattaggtttgggcaagtcacatagcctatatgaaccccaatatctacacttgtaacagcagggagttaactctgagatccctgccaacctaaaattctgagtctaattaattaagacatattggattatgaaatgttgagtggcacatacatttaaattaaaaaaccaaagaaatatatacttgaatgtacatcatttgtaattttgataagctaattaactaactgcactatcagatcaacactaagtctattattaacaagttggaaaattctagtaagttttgttgtgaaaggagtatagtaactagtgctgtgtgcaatccttatgactagccaaggccaacatgcagctcctatatgagcgtcttctcagaagaaaacagctacgaacacagaaagacaaccatctaggtacgtttacaaatagcttaagtaaatgatcccttttaattaaaaagtatgaaattttgctttaaattagcatcagatttcataaatgtatatttaataatgtggtatgtttccaccattctgaagaacttacctttaaaatcaatttggtttgtagataaattttggttaatttcctaattaatttgtaatattgaagtttttacttaaatctggaaatggtaaatgcaaaactcactggcttttttcatatgttttttaaagtttctatgaagagcactttttcaaaaccatgattattactacaatttgttggtttaatgacatcgccttaaatttgctcagttattttatctttggctaggcctagtgataatgaaatgtgattttaaaactaaaccaggccgggtgcggtgactcacgcctgtaatcccagcactttgggaggccaaggtgggcagatcacctgaggtcagaagttggagactagcctgaccaacataatgaaaccacgtctctactaaaaatacaaaattagccggatgtggtggcgcatgtctgtaatcccagctactcggaggctgaggcaggggaattgcttaaacctgggcagtggagattgcagtgagccgagatcgtgccattgcactccagcctaggcaacaaaagtgaaactctgcctcaaaaaaaactaaacctagttttctgcactgcagaaatagagaagagatgggaggctgaggcaggagaattgcttgaacccagaaggtgaaggttgcagtgagccaagatcgtgccactgcactccagcctgggcaagagagtcggactcccatctcaaaaaaaaaaaaaaaaaaaaaaaaagctttaaaaaaagaaatagagaagagaaatatcctatcaggatctgggttgtgttgtatgtttgtttgtttgttttagtcaatttgcatttattttttgttattctacatttaaaaagcaaaataacatcaaatcaccactctctggatatgttatgcatggtaaaggaaatgttctgatctcattattttattatacattttcatatatatgttagacttttcttgaatagccataatttattatctatgagtatattaaaagttttcactttgcgttcagtaaaccatcacaattttttaaaaaattatgaaaagctgtaggaatcaaaaagtgaaataaaataagtatttatttcccaattttcagaggtatgaaatgaaggaagttaaaaagccaaaatctatctcaacatttctcaggtgaaaactaactcagaaatatttgagttgtgttaattttcactaagactgttaagggaaactgattttcttgtcaggaaggaaaaagaagagttgaaaatttattgtcattctttctggaacatagtattatattctcatataaagttactgtaaaattaaagaattcatagtatgaaactgtggccatttatgacattttagcattttttagcaattaaaatatacttctaatttaaactattttattgccagcctatcagtttacatgtgagcattctaaataattttacagaatgcagtttaatgtaataagatctattttttaaaaatgggccagatcttggttgagtagaaaaatacttaattttcaaaactaaaacataatgaagttagttaacacttttgttgagatatcttttatccttaaacctaacattgtattgccgttgtctgagctgtgttataaatatttgttgaatgaatggatagatttagaaaataaatgttagatacatgtaccctttgacctagcatccccacttctgttcacctgtatcatagaaatagcatactaggtagtatgtaaagatacaggtacaagcatgtttattgcagtattgttcttagtggcaaaacagtataaacaaagatcaatgcccattatttgggcaaagagtggaatacagaatatatcatgatgcacccacatcaaggaatactgtgtagtcatcttaaaaaatgctttagtgctaggtaccagaatactgtggggtaatgctgagagaaaaaaagcaagatgcaaaaaattgtgcaaaatacaatcctatttttataaaacagtgactccaaaactcatatgtgtatatgtatatttgaaaaatatggaaggatatgctctagactgtaaccttggattagtaataagagccaagcccccccccccagaaatatatgataatcatcacatttatacatttctataaaactgtataaatggatatacagtatacccttgaataacaccagaactggggcactgacccctgtacagttaaaaatatacctgtaacttttgactcctctagtacttaccaactaatggcctactattcactgaaagccttacagataacataaacagttgattaatacataaaaagactagtatctacatgtttttatgcaatcatgacatattcatctttcttaattttttcaatatttctaggctacatagtttgcaagtttcatattctttccaaaatatttattgaaaaatacttgtgtataagtgcacctgcgtagatcaaacctatgttgctcaagggtctgttatatatgtcactttaaaaagaaaaaataattaaaataggattttaaactcccttaaaaatctaagtgatttcaaaattattttcagttctaagattttagagttaaattatgcttttaaacattctttaagatactgtttgcattgaagtagctctcagtagctataatgcaaacatacccatttatgcagttaggttcttctatgtaaacattagaaaaatgtgtcacaactctcaaaaccttattttctaatttttaaaaatcagaggtagaatatgtaatttctaagactaactttactgattttttttctgtcacaggaaaagatcatgagtaatgtgaaaacagatggtggttttaatgcagagtctgttgctggttttttagttttggaaagcccaatattagaagccactggtttatctaacagtgaaatgatttgtgaaatcattgcaaatttctttagttaccaacaagttggccaaattagtgatctattttttggtatatatcaatatctaaatacaatttacttgtatattttgtgagttatgaaatacatgtgttccattgatttttagttaacaacagagtatttgttgtttatgttaccgggtggggtacagcgtccttgattcttgttgaaggaagaattcagccaagagacacgcagcaagggttaagcagcagaatttatttaaagagacagtagtatactctgaaagataaagcagagcaagcttctggagagagtgagctagcagcagccagtgctggggaactctatgaagaatacatgattattcatgaaagggcatgaggaggtgtcacttgcaatcatgttttagatgatccccttgggcatacatgctctgtagttgtacatgctagtacacacgttgcttgtctcgttagcatttaaaatctccacctagggatgtgttttttactattataatgagcaaaagaccactctagggtgagttattggaggagtgcacatgcttcagggtcgcaggagcccaaccacaaggccaggtataaccaatatagccgttgtcctttttgctgtcagtgggcgacatctccaggacttctttgcccagaggctcccttgcctgctcgtatctggccgtctccccactctaacaattatactgtggttgtgtttttaccacataattgtgattgcttttttaaacaaatttaaatgtttatcatttttatcatgtagtaaacattcagtctgttttacaaattagtcagctgatgagtgaattcagggatgttatagaatgtgttcttgcctttgtgtgagaaagatcaattaaactctttcacaacaagattatgggaattttgtatgattataactatgctgttacagttcttttaaaagacctgtttgatttctacttaaaaattaagtgtatgtaaagatatttcagacattagtgtaattcctccctgccaaaaataaataatttataaatctttatattttgttagtttctgtttttcctggtaaatattatcattttaattgtaaatttgtgcacctctttatagattattatagcatacattaagtaaatcagaattctatgcaaatatctgcctcagtttaagaatattttatagaaaaataaatacattaggaactaactattaaaggatcttgacattcatttttattaaatagcctacacaccaggtatgttttaaatgtttcagtgataaaattaattttacttgagcattttaggaatagcttttgtaaaacacaagaaagcaaggcatatgtatatataacacaaaatactaaactgtactggaaattataaaatatgaaatacagtaaaatctaattatatagttggtcttttctgtgacacagttgtgcaagttactttatgtatatagttaatatttccttgacagtgttaactcttgtgaaaaataaaaaatgatatttatcagaatgtagaatttaataatcacattacctatgtaattaatatgtttatgaaaatatgttaccttgaaatttaattcattgaatacagtccagatcattcttaattttcagttttttatgggaattttatttatataaattaaatatctaacattggaatatttcctctactctttactccttccagaggaaatggatgtagaagctcgacttactgaactatgtgaagaagttaaggtacttggattttttaaattcacatcatcaagttatttgagtggtttctgtttcctattctaaatattttgtctatgaaaacttaaagtatttatagttcctaaaatgcaaagataaaatggttgatcatggtagaaccacaacttaggtggtcaaaattcatttggcttcagcatgaagttaacttaccttttaaaaagtatattattcttcatataaatgaaatagcaaagataattaactgatcaaacagtacattttcttctgttcactcactcaatttctggacacatttttaaaacatcacttaaacttgtaaaatgatactgtttaaaaatgaaaaatttgttttatttcagtagatcaatttgcttctcagatcattttttcagttcactcttgcaattaaattgaatatatttgcctttctttttctgagaaactaaatgctttaactatttaaatgtatgtttcactatgcattcactcttggtcagctacattaatggaagaaatcagaggtgtgaatcaaacaaaaatatgtatttggtttggatatacttttggatataaatttgaatgaagactagacctgttcaaaaaggtattctccttagaaaattatacatacgcaggatacatcagttttgtatactgtcctagaggttttctctgcagttcaagtaagatattttctttaaaaaagtcactaatgtgcttatgataattgctcaaaagaacattaaacatttaaaaataatcttaagatgtgtgcagttaatatgaaatcatctgcagtgtttcactgagctattaaagaaaatttgaataaatatacatatgatactcctgtagataatcactaaaagatatcaaattttactccagtcaatcattttaatgagtccaaaccaaaatcccactggaaatttaagcttgtttttaaaatcatttcaagaaatgtaaagatggctaagaaaaactttttttaaaataatgtaatttttaaataatacaaatgtagaaagacttgctcgactggatactaaaatatatgtaaaataataaaaatgaaaggaaataaggtaggatttctctaaaagaataaaaagacaagtcagaggaattaaacagccctaaaatagtcactattatgtttaataactaagtatatgataaaatattaacatcagggtctataaatattgtggtaaagttaacgtcatgccatgctatagcagcagttctaagtggactgaagacttaagtgtccaaagaaattaggaagaaaaaaattacatatatatgtaaatataaacaatctgatcttgggatatgaaatgactccctcagacaatttttaaaaagataagttttttaaagaccaataaaaacctaagggacaaaataagacattgatgatttgaaatttctttgtaacaaaatatactataaatttgaaagcaaaggatagactggaagagaatatttgcaatatttaaaacaggctaatggtcagtgctcacaatatataacatgctctcatgtatcaattttaaaacaacacccttgtaaaaaaaaaaaaaaaaggatacaatgaggcagtgtacaaataacaaattcttagcagaataatttagctcctgaaatgatactcattcttactggaaaccaggggaatgcagattctaataggttattttttttgcctatgaaatttgcaagaataaaagtgactactgagcttcattttttgtaagagtgtagtgaaactagtatctgcataccctgttggtgatggtataaattggcacagtattttttaacattagtgcattgatgtatttttaaaacacttatatattgcacaattatcaaatctgcacagcagtttttatttgataatctgttctacaaaaatactcataaatgtacacaaatataaggaattacatcattaattattatcaattcccatgtagccatttaaaagcattaggtggatctctatgaaattgtcatgaattatttaattcagaaaatatttattaatccatgaagcttgatactgtttgcgtgctgaaaactcttcaagatatattaattgaaaaaaataaagaaaaatatgaataatatgatttcatatagtatgttaaaactaaaaagctgtttgtgtattttattgtgtttatgtgattacatatgaaatatttgaaaggatatatatattccaagcttttaacagtaatacagaaaaaaagtggcgtgacgaataaggtttgtaaaggggaattttctttacatgcgtctatattaaatgtttaaaaataacatatgtatccatgtattgctaataaattttttagatatacatatttaaatttcagtatgtaaatggttgtcataaactttaacatcaacaacctataacatattataatgcgtcttgagacatggtgagatacaaattctcataccttgtatgtctttttcagggattagtttggcagtacgtatccacagccagaaaaaatatctcctcttagtgtataccaaaagctaaacagagttcatgtgaagattcataatattgtaaaaatgtttaataaatgcccaatggtagaatagttaaacaaattatgggatacttgtaatctaagttatacagccttaaaaatgatgtttttggccgggtgcggtggctcacgcctgtaatcccagcactttgggaagccgaagcgggcggatcacctgaggtcaggagttggagaccagtctggccaacatggcgaaaccacatctctactaaaaatacaaaaattagccgggcatggtggcgggcacctgcaatcccagctacttgggaggctgagtcagggagatttgcttgaacccgggaggcagtggttacagtgagccaaggtcacgccattgcactccagcctgggcgacagagtgagactctgtctcaaaaaaaaaaaaaaaaaaaaagatgttttaaacaagtgtttgatgaagtaggaaaatgttcatactgtattatattcagtgaaaattgtatgaaactatatattgttttagtttttgctttatgtatataattgaaaaaaacttgaagccggtacactaaaatgaacttttttcatctttttttgttttcccatattttctaagtaaagcagcattttgcaatcaaacaagatcagtgaatgttatgggaaaatatatatataagataatgtgatttgaaaaaaacacaaatatagccagacacagtggcacacaattgtagtcccagctactcaggagactgaggtgggagtactgcctgagtccaggaaatgagactgtattcatacctttgaatggccactgcactccagcctgggccaagtaatgaaaccttgtctcaagtttaaaaaaagaaaagaaaaatacacaaatgtaaagtcttattcctacatttatatatataagagatcttgccaaacttaattctaatttccttttttaatataaaaaagaattatattattatttattttggtatttattacatgagatttatgaaaaccagagaaatagtttatctgtgcttcaaggatgcttttccaacaatgagagtactgaagttttctctttcagaactgcggtatcatgatccctagggaataaaattaataagtactaggaatctagataaccttgctttcaggaagaataaaaagagagttgtgtactttatttatttatttattagcctgggttaaaggccagagaattgtttctacttttgtatagactatgctaagtaaagtgttcatatcttatacagtgctatttaattactctcaaatacttacccaactcttctttttctaaactccattaaaaccctccttggggacaataataatgcaagtttcagcttatgtcagcttatattttaaagtccatattcttaaaagagacatgaaaaacttgttagcttcatttctgctacatttataaaaccatctcttgggaaaaaaacacagcaggaaattcatcatatgtcgatgaatatttattcattatgtcttgactgttagcttccattccagcttctggtatttataaaccttttccataaattatgggagctctttttcataaaaatgtaaacactttccataaattctgtaaacatgtaaatgtttgttgtgaattctggaaggtttttttcttatctgaagactgtacttctcattcactcatttattcacttagtaactatttattgaattactactatgtaccagtaattagagtcacaaaagcgaataggacatgatcataattcctccccttcttactaattttgtttaatttttgtttagcgtcttctctgagttaggcaaggtaaatgaaagtgtgagttggggaagaaaagcctgctgaattgcagtatttaaaaagaaataaaaataaactgagagtaacagtatcatatgtgataagcagcctttggggatacacacacacatacacatacacagaaatatattttattttattttttatttttattatacttcaagttatgggatacatgttcagaacttgcaggtttgttacataggtgtacacgtgccatggtggtttgctgcacccatcaacctgtcgtctacattaggtatttttcataatgctatccttcccctagcccctcaccccctgacaggccctggtgtgtgatgttccccgtcctgtgtccatgtgttctcattgttcaactcccacttatgagtgagaacatgcggtgtttggttttctgttcctgtgttagtttgctgagaatgatggtttccagcttcatccatgtccctgcaaaggacatgaacttgtccttttttatggctgcatagtattccatggtgtatatgtgccacattttctttacctagtctattgttgatgggcatttgggttggttccaagtctttactgttgtgaatagtgctgcaataaacatacgtgtgcatgtatctttatagtagcatgatttataatcctttgggtataaacccagtaatggaattgctgggtcaagtggtatttctggttctagatccttaaggaattgccacagtctatctcattgtggttttgatttacatttctctagtgaccagtgatgataagctttttttcatatgtttgttggccacataaatgtcttcttttgagatgtgtctgttcatatccttcgtccacttttcaatggggttgtttttttctggtaaatttgtttaagttccttgtagattctagatattagccctttgtcagatggatagattgcaaaaattttctcccattctgtaggttgcctgttcactctgatgagtttgttctgctgtgcagaagctctttagtttaattagatcccatttgtcaattttggcttttgttcccattgcttttggtgttttagtcatgaagtctttgcccatcatgcccgtgtcctgaatggcattgcctaggttttcttgtagagtttgtatggttttagttcttacatctaagtctttaatccatcctgagttaattttgtataaggtgtaaggaaggggtccagtttcagttttctgcatatggctagccagttttcccagcaccatttattaaatagggaatcctttccccatttttttttttttggtcagatttgtcaaagatcagatggttgtagatgtgtggtgatatttctgaggcctctgttctgttccattggtctatgtatctgttttggtaccagtactatgctgttttggttactgtagccttgcagtgtagtttgaagtctggtagcgttatgcctccagctttgttctttttgcttaggattgtcttggctatacggtctcttttttggttccatatgaaatttaaagtagttttttctaattctgtgaagaaagtcaatagtatcttgatggggatagcattgaatctataaattactttggtcagtatagatagaatattgattcttcctatccatgagcatggaatgtttttccatttgtttgtgtcctctcttatttccttgagcagtggtttgtatttctccttgaagaggtccttcacatcccttgcaatttggattcctaggttttttattttcttcgtagcaattgtgaatgggaattcactcatgatttggctctctgtctattattggtgtataggaatgcttgtgatatttccacattgagtttgtatcctgagactttgctgaagttgcttatcagcttaaggagattttgggctgagacgatggggttttctaaatagacaatcatgtcatctgcaaacagggacagtttgacttcctctcttcctatttgaatacgttttatttctttctcttgccagattgccctggccagtacttccaatactatgttgaataggaggggtgagagagggcatccttgtcttgtgccagttttcaaagggaatgcttccagcttttgcccattcagtatgatattggctgtgggtttgtcataaatagctcttattattttgagatacgttccatcaatacctactttattgagagttcttaacatgaagggatgttaaattttgtcaaaggccttttctgcatctattgagataatcatgtggcttatggattacatttattgatttgcatatgttgaaccagccttgcatctcagggatgaagcctacttgatcatggtggataatctttttgatgtgctgctggattaggtttgccagtattttattgaggattttctcattgatgttcatcagagatattgacttgaaattttctttttttgttatgtctctgccaggttttggtatcaggatgatgctggcctcataaaatgagttaggcaggagtccctacttttccattgtttggaatagtttcagaaggaatggtactagcccctctttgtacctctagtagaattcggctgtgaatctgtctggtcctgggctttttttggttggtaggctgtaaattactgcctcaatttcagaccttgttattggcctattcagggattcgatatcttcctggttttctcttgggaggctgtatgtgtccaggaatttatccatttcttccagattttctagtttgtttgtgtagaggtgttgatagtattctctgatggtagtttgtatttctgtagggtcagtggtgatatcccttttatcattttttattgtgtctatttgattcttctctcttttcttctttattagtctcgctagtggtctacctattttgttaatcttttcaaaaaaaccagctcctggattcattgattttcttaaaggtttttcgtgtctctatctccttcagttctggtctgattttagttatttcttgtcttctgctagcttttgaatttgtttgttcttgcttctataattcttttaattgtgatgttacagtgtccattttagatcttttcagctttctgatgtgggcatttaatgctgtaaatttccctgttaacactgctttagctgtgtcccagagattctggtacattgtctctttgttctcattggtttcaaagaacttctttatttctgccttaatttcgttgtttacccagtagttattcaggagcaggttgttcagtttccacgtagttctgcagctttgagtgagtttcttaatcctgagttctaatttgattgcactgtggtctgagagactgtttattatgatttccattcttttgcatttgctgaggattttttacttccaattatgtaatcgattttagaataagtgctatgtggcactgagaagaatgtatattctgttgatttggggtgaagagttctgtagatgtctattaggtccacttgatccagagctgaattcaagtcctgaatatccttgttaattgcctgtctcattgatctgtctaatattgacagtggggttttaaagactcctactattattgtgtgggagtctaagtctctttgtaggtctctaataacttgctttatgaatctgggttctcctgtattggtgcatatatatttaggatagttagctcttcttgttgaattgatccctttaccattatgtaatgaccctctttgtctttttttatgtttgttggtttacagtctgttttatcagactaggatttcatcccctgctgtttgtttgtttgtttgttttccacttgcttggtaaatattcctccatccctttattttgagcctatatgtgtctttgcacatgagatgggtctcttgaatacagcacaccaatgggtcttgactctttatccaatttgccagtctgtgtttttaattggggcatttagtctatttacatttaaggttaatattgttatctattaatttgatcttgtcatcatgatactagctggttattttgcccattagtcaatgctgtttcttcatagtgtcattggtctttatattttggtgtgtttttacagtggctggtaccggttttcctttacatatttattgcttccttcaggagctcttgtgaggcagtcctggtgacaaaatccctcagcatttccttgtctgtaaaggattttatttctccttcacttatgaagctttttggttggatatgaaattctgggttgaaaatgcttttcttttgagaatgttgaatattggcccccactctcttctggcttgtaggatttctgcagagagctgtgctattattctgctgggcttccctttgtaggtaacctgacctttctctctggcttcccttaccattttttccttcatttcaaccttggagaatctgaagattatgtgttcttggggttgctcttcccaaggagtattttagtgctgttctctgtatttcctgagtttgaatgttggcctgtcatgctaggttaggggaagttctcctggataaaatcctgaagtgtgttttccattttggttccattctccctgtcacttttgggtacaccaatcaatcgtaggtttggtcttttcacatagtcccacattttttggaggctttgttcattcctttttcaattcttttttgtctaatcttgtcttcatgccttatttcagtaagttgatcttcagtctctgatatcctttcttcagcttcatcgatttggctattgatatttgtgtatgcttcatgaagttctcgtgttgttttttcaactccattgggtcatttatgttcctctctaaactggttattcttgttagcagttcctgtaaccttttatcaaggttcttagcttccttgcattgggttaggacatgctcctttagctcagaggagtttgttattacccaccttctgaagcctccttctgtcaattcgtcagtctcactctccgtccagttttgtgtccttgctggagaggagttgcaatcatttggagaagaggcattttggtttttggaattttcagcacttttgcactggtttttcctcatcttcatggatttatctacctttaatctttgaggctgatggcctttggatggcgtttttgtgtgggggtcctttttgttgatgtcgatgtttttgttttctgtttgttagtttttcttctaacagtaaggcccctctgctgcaggtctgttgcagtttattggaggtccactccaggccctgtttgcctgggtatcaccagtggaggctgcacaacagcaaagatggctgcctgctccttcctctggtagcttcatcccagaggggcaccatcctgataccacctggagctctcttgtatgagttgtctgtcgacccctgttgggagttctgtcccagtcagaaggcacgggggtcagggacccacttgaggaggcagtctgtcccttagcagagctggtgcactgtgctcagagaatcccttttgtcaggatcagctgctctctttagagccagcaggcaggaatgattaaatctgctgaagctgcacccacagctgccccttccccgaggggctctgtcccagggagatgggagtttatctgtaagcccctgactggggctgttacccttccttcagtgatgcccttcccagtgaggaggaatctagagaagcagtctggccacagctgctttggtgcgctgtggtgagttctgcccagtctaaaccttccagcctccttagcactgtcagtggaaaaccacctactaaagcctcagtaatggcagacacccctcccctaccaagcttgatcttccccagtcggcttcagactgctgtgctggcagcgagaatttcaagccagtgattcctagcttgctgggctccgtgggagagggacccgctgagagagaccacctggctccctggcttcagcctcctttgcaggggagtgaacggttctgtctcgctggggttccaggcaccactgggttatgaaaaaaactcctgcagctagctcagtgtctgcccaaacagctgcccagttttgtgcttgtaacccaaggtcctggtggtacaggcacatgagggaacctcctgatctgcagattgcaaaaactgtggggaaagcatagtgatctgaccgggtagcacagccctcatggctttgcttggcttggggagggaggtcccctggcttctcgtaacgccccaccctgcttctactcaccctccgtgggttggactcactgcctaaccagtgccaatgtgatgaactgggtacctcagttggaaatgcagaaatcacccaccttctgcgatggtgtcactgggagctgcagaccagagctgttcctattcggccatctttggatcatgtcctaataacagtattttataatagtttgtttacctgcttttctcccctcactagactgtgaacttctcatattaatttttgtatctctagaatctaggccattagcatttaaaatgtgttcaataaatagcaagtgagtgaattgttagaaatgaaaaaaataaagtgacaattctgtaaaaggattactcacaagtgaagtagaatctaagaacataggagtgagagaaaaggactatttcagaaagtatcacaattttttctaaggagtcatagatattttaagtattttttcttagctaattggggaaaaaatctgaagaatttattatctttcaaaacaattataactctcattatttgagcactgtgtttaaaattcccagtattttggtgttagaagctgatcattctctatagcatcctaatttgtaattttagtttgcaattgacattatttcagttaacaagacatcttagatattgaaatattggttaagttgttgaaaattctttcagtaactatcaggtaagtaaaaaaccattgttaattggtctttgtctctacacatgtgcatgcacatacaaatgcacatctctttttttaaaccacaaatttgcctttgtattaatattctcaataacattatatttaagtatgttacattaaatcttgggaaatagtgaaattttttttcttttcatttcagaaaatagagaatcctgatgaactggcagaacttataaatatgaatcttgcgcaactttgctcacttttgatggctttatggggacagtttctggaagttataacgctacacgaagaactaagaatattattagcacaagagcaccatactttgagggtaagttaaagagaagtgattttagagcattttaatgagtattatttacctttagaaaatttttatgaaaacaaacctgatttttacctatatattgataaatcagaaaagagacatttgtcatattgttattgtttgacttccaaaattaataatagaatagaacaatacagttaagcatatgacctatttcaatcacaatccctgctgctaagaaaaaccacctaaaagtaagtaaaataggaaaatatatgatacagaatagaataggaacctaagaataggaattaatagccaagcctcattagggacaggaatcaggaactagagagctgtctcaaacttatatctccctcttctccttttccttcccttcttctaccactgacctaatataggaatgtgtattattaacttagcaggatggagggggcagtccacacattacacatatatgtttactgtagacctagtatggacattatgcaggtatttctatgtaattttattgtatagcatctcaagaggttttacgtgttaaataactatctttccatcttgtttccttatatactctgcatgcaccctgattttactttacgtactaggagttcctccaaacatcattaatttttttccttttttaaaaaaattttttaattataaaacataacacataaagtcagaaaatgcataaaacaggcacattttatcaaataattaaagcatacaccctttcagttattatccagatcaagaagtagaacactctcaatgctacagatgttctctctgtatcttttccaattaccatacccttcctaatacttagaagtaatcactatactgtcttttgtgatgatgagttccttccattttagttttatcacctatgtatgcacactaaatagaggttgtttccacctgttattgaattctatatagatgaaattgtacagtagtattcttctctatcttgctttttcactcaagacattaggatattaatccatcttttttgacagtacctgtagattgttcattatcattgctgtaatatatctccatttgaatatacccacatttatttatccattctactgttgatagattcttggattacttctaacttgtggctattacaaaccaagctgctatgaacattcttatgtatatgtcctggcataccagtttctctgaaatacttacctgtgaggcaaattgctgagtcataggttatgcataacttcaattttactagctaatgtgacagttttcagagttgtaccaatttttactcccaccagcacagtttgttactccacacactctccaactcttgatactggcaagctttttaaactttgccaaactgatggatgcgaaatggtatattattgtggctttaatttgcatttctctgattacccatgcagttgagcactgctttgtgtgattattggttatgtaggtttgctccatatgaagtgcctattctaatgttttgcccatttctaataagataacttttttcttctttatttctgatacttttctgtgtcctttgttatgtgtttttactaatagatcctctctcatttcatggtttattattttcattgactttatattgttttttaatgaactggaggtcttaattttagaatagaaggaaactaagagaaaggccagacatggacatagccatttttggacataacatatgtggatcggtgtaaaagatggagatttttcaataaatgatgtttgagacaattgggtatccatatggtaagtattaaataaaattcagttccaagtggattgaagatttaaatgtgaaaggcaaaactgtaaagcttctaaagtataatcagaaacttacagaagactttaaaaagttggccaggagcagtggctcacactgtcccagcactttgggaggccaaggcaggtggatcacctgaggtcaggagttcaagaccagcctggccaacatagtgaaaccccatctctactaaaaatacaaaaattatccaggcgtggtggcgagtacctgtaatcccagctacttgggaggctgaggcaggtggtagaggtggaggttgcagtgagctgagatcacaccactgcactccagcctgggcaacaagagtcaaactccatctcaaaaaaaaaaaaaaggtagtgcagagtacttctatataattttcatcagaatcacaaattagcattttggtacatttgctttatcattgcctgttttttgtaggtagatacacatatatatatatatatatgcatacatatatacttacatacattgtttttcctgaacaatatgataattatagacatagtattcttttatcattaaatacttcagcatatatattctaagaatatggacattctcttaggttaaccaatacactgatcttctttagaaaattttatattgacacaatattgatatttaatgtatggcccatatttaagttttgccaatcatcttactaatgttttgcataacagctttttccaagatcaaattcaggaacacattgaattcagttttcatgttcctttactcatttaatctggactaattccttatctttgcgtgaccttgatttttttgaagagtattggccagtaagtttgtgaactattcttcagtttgggtttgtattatatttcccggtgattagattaagatgacacagtattggggggatactacatttttttttcaatcagttttggtaaattatatttttggaggagtttgcccattttgagtttttaaatttataatcaagtagttcatagtatccttcaattatctttttaatatctacaatatttaatgttttctagtttcattcctgattttattctagtttctagttgtttgtgccttcactctttttttcttgaattgtctcaccagaagtttgttattttatttgtcttttcgaaaaagcaatttttggtggtgttaattttctccttgtgtgttttgttttgtttcattatttttgctatattgtagtaaacaggatccatgtatcaaatactgttgttttataggactttttcttagaatttctttattaaaggtcaatcaccttctttaaagggctaaataaaaaggattctacaatggataaaatagcataatcactgtattcaacttactaatggtctggcatcatcttaatgtagcaatttagaatgaatagcataatgaatggaatatatttttttccgcaattttcaggaacatcatttctcactaccaagattttgaacaacaatgaattgtggtaatagtatcagaaaggtagccagttttcagggtaaattaaagtgatgttgataagcattaaaggatctcactgacattctttttttggaaatttaggactctgacaagacttgaaaggcagtccacctctataaagaggtgaggtgaatgcataccaataactcaggcaaagttttcttgaaaagtatgtcagaatacacaaccagcgacccaattttctatgctgtaaaacaagaatcaactttttctgttaaggaccaaatggtaaacattttggactttgggagccacacatctttgtctaaactactcaactctgttataacatgaaagcagccatggatggtatatgaataagtgaatgtggctgtgtttcaataaagttttatttacaaaaacaggtgttgggccagatttggttctcaggctgtagtttgccaacgcctacattataaagctaagaggagagttgatacctcttccacaaaataaaagtctgtttgaaggttatttttagtgaccagtagaagtaaaggccagtagcaagaaatagttttacatgggaaaggtaatcttcagggtatttttttctcttttttttttattttgttttttctttttttttttttaatttttatgtttttatttagttcccgcaagcagacagggtatttttttaaaaactatgttttactagagaaaaatattatagttccattaaattgttctgtttgtgtcacctgaatggaagttctgggaagagaatggtcgcaaggattagaggcaactttatagcttgatattcaatgggaaggaagctattctgggtggactaggaacaagaaggtaaacttaaaagagcagctggtgaacacaactttgagaagaagggacaaagaaaggggactaagacaaaaatcaggtttgtggaaaattagaataccaaagataaactttggaattttacctagcgcttcccttttctcaccccattccagataccaagatagggcctattttaattgctaaatgaatcatggaaggataataaagacaaaataagaaaatgtcctaatgttactcaagcaggaataagctttgcccttccctgcagtgtatcacaaaaactgtggacatggtagcatactgtgttatctggctcccatttatgcaattcaagaggaaccttgctaataaaatatcttgttcttctgagaatacagtgctaagcctacaggaactgaagtagtctaaaggtcattcagtgtttgtacagggacagacttagctacaataaagtatataggctgtctgataacgaattcagaagcagcacaattgagcaaagtcacagaaataaacctctgatatgaaatctctccttattggtgtgaaagcaaattgtgaagcaaagagttggactaaaaagaggaaatgtaaatctatacttgaaaagaacaatttaataaattaattttatactggttcaactatattatttaatattaagatccagtaagttcaggttttcaaatttttggcaaattaaggcatccaaacttgttgagcttctgtagtcacatgccgtacacattcatgctacatcatagagactattgtgtgtgaatagttacaggtgacccatactaattaaaaagataaaatatatttatgataagtgaataatgtctttgtcatttcaaactaaaatggaatgatcaagtgggacagtttacacaaaaagcaaaaaaaaatctgaaatcatcctgaattttatgtgtcaagaactgtaaagaatcttgagattttgccctcctaattacatgctaacaagttagcctaccatagattgattcatgtatagcagcagaaaacttgagacaaaggaccttattaatggtaggattatcatttgttctctttccttgagcctagatttccacagctcaacataaaaaaggcgaggttcatactagtggattgcaatacaggagaaaaactctgtgcttagggatccaaaatattttataatgcacagcaagctttatccaccaatgctgtaagtggacctgttctttgctccaaagggagacatatctctgtttccccaggcttttccctaatacgagcatccttgaaaagatagtctgtaacaaagacagtcaggatttctgctcacaagcctttcagaaatgcaagagacacatgaagaattgtctctcaacagtatgtcttatagagaacttgctttcattgcagtttatttcctcaataattttactgatctttattgctagtgcttccaaagatacctcttgttgtgttataatgcttcctattataacatcagagatgccatatttaatattgattgtaacttgtgtctggaattataagtccaatattagggagataatatattcagtttgcagatcagagagccagattttgtgctttgtgctagcattgctgccctaaccaagcttttgttagggttagtggagtcagacaaagtaacagttgagttcacattctttcagagacatgatggttacatcagcttgtataaatctttagttctatcatacaaaatatttataaataaagatcctgaagccaaatacatagggttgccagatgaaatgcagaatgcccagttaaatttggatttcaggtaaacagcaaatgatatttcaatataagtatatctggtgcaaccctatcaaatagcatactaaagcatcaaaaggtttaattgtgttttacatatttctgtatgtgaagtattaatatatcttagatacggaaaagaattccttgctcaagaagaaaacaaattttaagcttattcttgtgtggaagcagggccttttggaaacatatggctttacttaaaatgcgtgcactgttatttatggttctaacctagagcaaaaaaaatccaagttgatatggtgactctgctattcagttacttagtattctgtaatattgctcatttaaattcatcacattaacatgtctttcctggctgggcacagtggctcacacttgtaatcccagcactgtggaaggtggaggtgggaggatcacttgaggctgggagtttacaaccagcctgggcaacatagtgagatcttgtctctattaaaaaaaaaattatgtctttccttgaactataaaatggaactctgcttctatgaggttagcctcttttattctttgactaacatctctctcaccttgtagttgcctgtttatgtttttgatttcatagcaacaggtttgttactaatgctttattgaaattacagtgattcttccaggaccactgcctgtaagcccaaggattcatctaaaaattgaaaggagaccttcatagatggatagactatattgtgctcttggttttgtttgtttttcccacagaatgtttatggaaggaccatagtaatttatttatatttttacttaataaacgtgtatagcagttattatctgtgtaaggcactaattgctttataaatgttaactcatttaatcatcagtacaatctcatgaagtaaatattttgtcattcccattttataaaagaaatattgaggttctagaaaggtgaaataacttagccaaagttgcatatcttgtacatggtagtgactggatgggaacccaggcagtagatgcagacctgatatttccacatttcatctctttcccatgaatttgcaaagtattaaaaacgaagtaaattaagacttcaaacaaaatagtagtacaaacttataacattagaataccgtttattatgacgctggtttgctatactgtttatattttacaagcaaaaagaaatacaatctcaaacatagttttcagtgtcaacttggtggtataaaatatagttttggattttttttccagttgaatttaaagagaacatgccatttgctgcattcactggaattaatcataaaaaaatactgtagaacactaagtatgctgccgttggtctaatagctaggaaatcaaaacgtttattgacagcaccaccgaagtagaagattcaaaggcatagatgttatgtaacatgatatatataggtaactgtttcctaagatttaattttgttggggggcgggtggggataacaaattttgagggtaacagattttatgtaatgcaaattaaccattaacaattttaatgtatacaattcagtggcatttaatatagtcacagtgttgtgtaaccatcacctctgtcttattccaagacattttcatcactctgaaaggaaaccgtgtacacattaaggaatcactcccatgtcccctttccccattccctggcaaccgctagtctcatttactgatcttggaagtttcatataaatgtaatcatacaacattttgtatctggtttctttcacttagaataatgtaccaagtttcacccatgttttacatgtatccatataatgatttatttttgtagcagaattccattgtatggatatactacattattttatctgtttgtcattgatagacatttaagttctttctacctattgactactatgaatagttgctggtatgaaaatttgtgtacaaatatttgtttgaatatctgtttttagttatttggggtatatacctaggagtggaattgctgagtcatatggtaattctatgtttaactttttgaggaacatccaaactgttttccacagcagctgcaccaccttacattcccaccagcaatgtacaaggattctaatttcttcatatacttacaaacacttgttatattctgctttttgttttggggtttttatcatggccaacctagtaagagtgagatggtattttcattgtagctttgatttgcagtaccctaatgactagtgaccttggacaccttttcatatgcttatttaccatttgtgtatctcctttggagaaatgtgtattcaggtcctttccccatattttaattgggttgtttgtctttttgttgttgagtttcagttatttatatattctggtaactaggcccttatctgatacataatttgcaaatgttttcttctattctatgagttgctttttagctctcttgataatgttctttggtgcacaggacatcagggcagcaggaaaaatcttaaatttatttttccccagtaaaagaaatcctgtaaattaagataaatatattcagcagttatcgtcatgataaaaaattttaaagatataaggtaacccttgagagaaagtattgtgcttatatctgctactaatacagttttcttggaatacttattacatgcaatggaaaaaatccacatggtaagggggagagaaaaggatttctaatctcaatttaattagtgtatatctatgttaccatagattttcttgcctgatatcaggatatatttgattttttaaaaaattgagagtcctcagagaggccaaagcccagaatctttatattcaggagatctaggttgtataaacacttgtacagtcttgtgttacttaatgattaggatactttctggaaaatgctttgttaggtgatttcatcattgtgtgaacattatagaatatactatagaacatcatagaatatactacccaaagctagatagtatagcctgctacacacctaaactagataatacagcctgttactcctacgctacaaacctgtacagcatgtgactgtactgaatactgtgttgcaacacagtggtatttgtgtatctaagcctatctaaacatagaaaaggtacagtaaaaatatggcattgtaattttaggggagaccatcctatacgcgatccatcattgtcttaaacgtcattatgtggagcatgactatatgaacttactgaattatcattataacatattttgaaaactactcaatacttcaagaaaattatttcattacttcacaaaatgactttgtgctgcttttcggtcagttcctacaccccataagcaactactgtcttgattagaaatagaattttcatttacttcagtcaacataatttcttttagattagcccatgttgtatatatttgtagttcatttctttatcgttgagtagtattttatggtatcgtatatcagaattcatttatctgttccccttaactcttctgagtaaagatgctacgaacattcttctacagatcttttttgtgaacataagtttttatttctattgcttacatacataggagtaaaattgcttggtcattgggtagatttatcttcaacttaataaaaaatcatttttttttccaaaatggctatacagttttaaactcctaacattaacgtatgagagtttcagttgttccacatgcttgtattgtttggtgtcgtcagtctttaactactatagtaggggtaaagtggaatttcattatggctttattttgcttttctctgctgactcctgatattgagggtttttgttatgactttagttttgtaaaatgttaaattaggttgcctttttattactgacttattaagattatttatatatattctagttatggatccattgtcaaatatatttattaaattctcctagcctgaggtttatattttcgttttctcagtgatgtattttgatgagactaagtacaatttatctttttttcttttatgtttagtacttttgtgtcctaagaaatctttgcccaagtcatgaaaaatattattctgtatttgctttagagagcattagaattatagatcttacatttaggaccatgggtcatcttgaattaattttttaatttggtgtgaggtgtatgggtcaagattctttcttttttttttctgttcaggtttttgacatcatttattgaaaacacttttctgactctatggaattgccttaaaatctttgttgaaaatcaattgactaataagcatgagtctatttcttgaccttttttcctgttgcattggcctgttatacatctctatgttaataaataccacactaactttattgttataatattatactaagtcttgcagccaggtaatagcataagtcctccaaggttttcttcttttttgagattgttttggctattctagatctcttgcaattctatataaattttaaatcaagtgttaacagctcttttagaatttgtctagcaggttttctggtttttattggaaaaccttcctccacagaaaattttaaatcatgtcaatttcttttttttttttttttttaatcctcttgggatttcagtttacattaagtaaaatctatagatcaatttagggacaattacctccttaaccatattgattcggacaatttgtgggcatgatatagcttcctatctagctccccttttatttagaccttcaatttctctaaaacctgcttttgtagtttttatgcctgaagtttactcataagcattttatattatctgatactattataaatggtttttaaattttattttccaaatggttgctactaggatgtagaagtataattgatttttgcatattgaccttatactttattgctttgctaaattttttaggtagagtattctataaatctcaatcagctcaagttggtcaatagcgttatttaaccttggactgacagttttctccctctgtttgagtactttaaaaagtaccattatcttctggcctctgtagtctgattaaaaagtcagttatttatactatttttcccctctggctgcctttaggatttttctccttgtctttgttttccagcagtttgactatgatatgccttgttgcagttttattgtttttgttgttgtttgtttttttttgtctttatcttgcttaggatttgctgatattcttggagctctaggttatttttatcagttttaaagagatttgctattatatcttcagatatattttctgccccatttctttccctcccttctccctctagtactctaattatatgtatattatatcatttgatactcttgtttttcagcaatttatcctctatgttcttcagactgaataatttctgttattctgtcttcagattcattaactcttttctgtagcaactaatctgctcttaatctcatctagtaaaatttcacttcagatattatatattttacttcttaaatttccatttggttctcttcacgtataatacttccatttttatgctgagaagccctgtctgtttactgtttatgaccagcttctttcagtcattgggcaatttataattattgtttaaaagtccttgcttagaattctagtttctgagccagcatggaagagctttggaagttgttactcccatcctaaccagaaaaaatctgaacgaactgaaaaatcaacaactcttcttagatttatcggagaattaaggtcacaggcaaactcctgtccccaaaattggtgagtcagatagccagttacagagaatcccatcttaatggaacaaaaacccatgaacagaaatcaccactgtagccagtcctgcaataggaaaacttctaattgatgattcctggagactcagtatggacagatgagttaaaaactcctggcaggggtgagggaggtcttaggggatcccatacttttcatgactttcacttccaagagccctcccagtttctttcagtgaaaattgcagaaaagccctcatacttccagatggtggggagggaatgtagccattttgaaatacatccagaacattctgtccttaacaaaatgtgcctcagtagaaactatcttatcagagcttcactgacctgggaggaagagaaatatccaactctagccttctgtatgggggaaataaaatatccgttatcatatgttattagagaattacaaatcaaaacaagataaccaccgtatacctataagaatggctataatccaaaacactgacaacagcaaatgttggtgagatgtggagcaacaggaattcccattcattcctggtaggaacacaaaataggatggccactttggaagacactttggtagtttcttacaaaactgaacatactctcatcatataatccagctatcacaccgcttggtgtttacccaaatgaattgaaaatttatgtccacacaaaaacctccacatatagcagctttattcataatcatcaaatttggaagcaaccaagatgtccttcagtaggtaactggataaacaaactgttgtccattcatacagtggaatgttatttagcaataaaaagaaatgatcagtgaagccatgaaaagacatagaggaaacttgaaagcatattgcaggctgaaagaagccaacctgaaaaatctacatatatgtatgatttcaactatacgacattctggaaaaagaaaaactatggtgacagtaaaaagatccgggttgtcaggggctctgggggacagagggagggacaggtaggtagagcacaggggatttggggggcagtagaagtattctgtatgatactgtaatggtatatatatgtcattatatatttttcaagccccatgtaccacaccaagagtgaaccttaatgtaaataatggactttaatattgatatattaatattggttcatcagttgaaacaaatgtaccacagtaacacaagatgtaaataagaggggaagctggatgtgtaggggtggggaagagggcaatatggaaactcttcgtactttctgatcagtttttctgtaaacctaaaactgctgtaaaaaaaaaataaagtaactttttaaaaaattgcctacttattcaaacatttcaattatcttggtgtctctttctattggctgattttatctcgattgtagattatattttcctgatgctttgcctgtctagtgcttgttcctcagtgcttgaaaaagtcacttcatgtattttaaccagttttacagttgtttgcagaaggaagagggtaagttctcctctcatggtctcagttgacattaaaatagaagttttcagccccggctgtacatttgaatttcttgggaacttagatcagtgctgaatgaggtccagacctagggaactttttaaaagttgtgcaagtgattaacagggttagggtatccctgagtaactgtgctagaaagagtgggaactgaaatttggcctgtcctccttggagtctagttgcatctgcctgtagaaggagcatgtttttgaaatttatactttaaagctgccatatggattagcaggatcctagattctaatgtggacccattaccttccagtaaggaaaccagagtgtcagtgaattcttattagcttttattgagattttaatatcataaaatagtattttcttttctttttttttttttttttttttttgagacagagtcttgctctgtcacccaggctggagtgcagtggcgtgacctcggctcactgcaagctccgcctcctgggttcacgccattctccatctcagcctcccaagtagctgggactacaggcactcgccaccatgcctggctaatttttttgtatttttggtagagatgaggtttcaccgtgttagccaggatggtctcgatctcctgaccttgtgatccgcccatctcggcctcccaaagtgctgggattacaggtgtgagccaccgtgcccagccataaaatagtattttcaacagtattgatggaacttatattctagtagaggggaaaagttaggaatagcttgtatagccattcttttccactttaagaacctctttacaatgatgcattatttactcaaaacattatgaagtttgcatttttaagaagagatacttattgcttaaactacttgatctgatattctttgagtataactgtgaatgtctattttctaaataaattaaaagtacttctttctgggaacatattgcttatttatagtatataatttgatgcttttatatttcgcaaggtttaggcagacttccaatttggctataactataagcataaacaatattttatcacctttatgtgtatatatacaaaccacatctagcacttccagtaaataagtctatccaggtgggggatggtggcttatgccaataatgctaacattttgggaggctgaggtgagtggatcacttgagcccaggagttccagaccagcctgggcaagatggggaaacctcatctctacaaaaaatacaactattagccaggcatggtggtgtgcacgtctttttcctttttttttttttttttttttagatggagttttgctcttgtcacccaggctggagtgcaatggcacgatcttagctcactgcaacctctgcctccccggttcaagcaattctcctgcctcagcctcctaattagctgagattacaggtgcctgccaccatgtccagctaatttttgtatttttagtagagacagggtttcaccgtgttggttaggctggtctcgaactcctcccctcaggtgatccacctgcctcggcctcccatagtggtgggattacaggcatgagccccatgcccagccagtagtgtgatctttaatgggtaattttttttctttaaatattctaaccataatctttgatgttactattggaattgttttgaagcaccacagttgtgcccatatatgacagtgaacttaatacatgttgtgtttgttctgactgtttcaccaactagcattcccttcatctctcttcctctacttgggtctccatattccctgagaaacagcaatatttaaattaggccagttaatatgcaatgatctctaagtgttcaagtgagaggaaaagttgcaagtttctcaatttaaatcagaagctcgagatgattaagcttagggaggaaggcatgtcgaaagccaagatagactgcaaggtaggtctcttgcaccagttagccaacttgtgaatgtaaaggaaaagttattgaaggaaattgaaatgcttttctaatggaacgataagaaagtgaaacagccttagtagtgatgtgggaaaagattgagtgttctggatagaagatcaaaccagccacaacagtgccttaagtcaaagcctaatccacagcagggtcctaactcttttcaattctatgaaggctgaaaggtaaggaagctacagaagaaaaatttgaaactagcagagattgggtgttgaggtttaaggcaggaagtctccataacataaaagtgtgaggtaaggcagcaagttctgatggagaagctacagcacattatccagaagatctagcaaaaataattgatgaaggtggctgcactaaacaacaggttttcaatggagataaaacagccttctagtagaagaaaatgccatctaggactttcatagctagaaaagagaaatcagtacatgactttaaagggcaggctgactctcttgttaggagctaatgtaactggtgccttgaagttgaagccagtactcatttaccattcctaaattctagagctcttgagaattatgcagaatctactctgctgcattaacaaaacaacaaagcctagattacagcacatctgtttacagcatggtttactaaatattttaagcccactgttgagacctacagttcaggaataaaaagattcctttcagaatattattgctcattaatattgcacctactcagccaagacctctcatggagatatacaaggagattaacgatgtttccatgtggactaacacaacgatctattcttcagcccatgtgatgcatgagtcattttgactttcaaaccttattacttaaatacattttgtaaggtgttggctgccccagatggtgattcctctggtggatctgggcaaaaggaaaacttttgggaaaaaatcaccgttgtagatgccattaagaacattcatgattcaaggaaggaggtcaaaatatcaacatgaacagaagtttggaagaggttgattctaaccctcataggtaactttgaaggggtcacgacgagtggagaaaataactgcaaatgtggtataaatagcaagagaactagaattagaagtggagcctgaagatgtgactgaatggctgcaatctcattatcaaacttgaatagatgaagagttgcttcttatggatgaacagagaaagtggtttcttgagatagactctactcctggtgaagatgctgcgaacattgttgaaataacaaaagatttggaatattacataaacttagttgaaaaagcagtggcgagtcaagaggattgactcaattttgaagttctactctgggtaaaatgctgttaaactgcatcacatgctaaggagaaatcttttgtgaaaggaagagtcaattgatgcagcaaacttcattgttgtaatttaagaaattgccatagccactgcagccaccctgatcagcagctatcaatatcaaggcaagaccttccagcagcaaaagtagccgaaggctcagatgatcattagcatttttaacaataaaatatttttaaagtatacacattggcttttttaaaaaaggtataatgctattgcacacttaagagactacagtatagtgtaaacataacttttatacacactgggaaactgaaaaaattcatgtgacttgctttattgcaatattcaccttattgtggtggtctggaccctaacccataatatttccaaggcatgcctatactaaacatactttagtataggtatgatatgatatatatgataataatttagttgtgaattttatttaatgtgctcagcttttaatgcactagtattccatattattaaaaatgccaggatattggaatatccattaaaagacctcaagtattaattttttatttattttgtgtgatcttttataggggaattctaggctttttttttaaggacggatatttcttcatcacgttctcatcatttcttgtaactgcctgtgtacttacctctgtaattcatttttctttgtctaatttgctcttttaatgtggtgtggattgggaaagcaaataactgaaaccaagtgcaattgtatcaactagtaagtataaatcagctttgtaatgaaacaattttatgataattttgctatgagttagtgcaaggacgtaaaaaacatttgttcagtaaacatttgcaaggtgcttatttttttcaaggtagcatagatattagataatctatcagatatagaccctgcactcaagattagaatctaatctgaatgcacatgtatagaattgtaatataaatactgtgttagcaatttgaacagcattattagaatgaacacagatacaggagtatttaactctgtgaagcattaacaaatacttattttgaatgcttggctgtcttcctcctagcttttgaataagtgatgttgccaaataagtttttttttaattgggcacacaaaattcattttttataaatatcaaaaatgcatgccaaaatacatacatatacaaagcagtaatatatatattccccatatttgaaatttaaatttgtaaattaaaaatttttttctgtcaaacttttgcctgaaaattagctgtattgccatcaggtggcagtcataccttagttatggccacacactacagttaatacccttagttgtaatagctacagcatgataattatgctgagagtgaatttagaaagaacttcatttgggtgcatacaagaaagatttctgataacaaggagtcttaatgcagaaaggaaaaggtaagtgtttggagcacaagaactggagtttctcaaatcttcgtttgaatcacaggtttatcgcctactagctatgttatcttggccaaataattaacctctttgtgtctttgtttcctcacctattaaatgaagataatatcatcctagaggtttttttttgtttgttttttcttcatcattcaatttgacattgagtttttatgtggtttaagtcaaagaattagaataaagtttttagtgtggagactatgaggtagagtactgtcaagaaatgatcattattgtaggacttagagaaggtagagagagaaggaaaagcagctagcgccagtttcgtaggtccagctgcaactgcaggaatccagataacttaaagatgcgtttttttcatgctttatagccccaaaggaaatcatcttaatagccagacaggctgttatttttctctcacctttcctttaatgttggagaggggaaaaaagcatttggaccacatatgaaagtaaagacacagaatgcatccttctcattgatatcttcttttcccacttccctcattgacttgtttgtctgaagacccaggtttatctgcttagggaaacaagtttagtaagtcagaaattcacctggccggatattgatgacaagtaaaataggtctctaatttgttggacatttaaaaccaaagaatcctagatcttactttgtttagaaaataattgtagatgtaatataatttctcctccctgtactgtccaaataagacatcttttctggctcctgttgcctaattttgctccagtagctgacaaagcctttcctttcataattaaaaatgaaagggttaaaatacaaatataatggaagaaatgttcagctagattcaacatgtatttatcaagtacttgattctgtaatatgccaagatacatgttttgtggggatgcaaaggtcatcaaaacatagctttgccttttttttgttttgtttttttgagacaggagtttcactcttgtcgcccaggctggagtgcaagggcgccatcttggctcactgcaacccctgcctcctgggttcaggcgattctcctgcctcagcctcctgagtagctgggattacaagcacctgccaccatgccccactaatttttgtgtttttagtagagacagggtttcaccatgttggccaggctggtctcgaactcttgacctcaggtaatccacccacctcagcctcccagagttctgggattacaggtgtgaggcaccacgcctggcccatagcttctcttctaaagaacattacactttaggaggggagatgatttattttaagacaaaaggtggtaaaggctatggtggtaatcataatagtttatatttatatatgctttccagatttatttcatgcagtacaaaaatacattggcaacactgaagagggagaagggaagtttaattctgacgggtgattgtggaaggcgtaatggaggcagtttctctccttaccataagatgccggattgactttttaaatacgtcatgttattaatactctcctttggaattttttaggtacgcagattttctgaggcattcttttgttttgagcatccaagagaagctgccattgcataccaggaacttcagtgagtagtataaattcaaaattaaaatgatattacttccttttacataagatacctgtctcagaatttatcagtgacagaatatacagtattaacaatataagaaattaggagaatttgaatttcagaaatcccatctataatcaaattgtttcatcttattagttacttcattaaagttccatactttacatataaagaagcataatgcactgtattcctccctccttttttatcagatctaccataatcttggtagtctcatacagctttggctgtagccttccatttagccatattctgtctttattttcacaggccagaatttcttatgttcatccttttttattacagattttcatatatactgtcttctgtaattgtaaatgatttacaattaaaatatccagaacaaatgccttctatctttcctactgagtagatttagtcctggttttctttggcattaaggaatattttgaggacattatgctgagcaaaaaaagctagacattaaaaattgaatactgtatgattctacttatatgaagttataaacaagcaaaagcaagatggaaaaaagacaggacatggttttcttggcattgacttgtgctggattgggaagacatgagggaaccatctgagtagatggaaatgttctgtatcatatatccatttgtcaaaagcatacagctaagatttatattttaatgcatataaattataccacaaaaaaaatcctgtaaataataatagagtatcagggtaggtagtgagtgctgatagaaagggtatatgttaactgttgaagttcggaggtatgtatatggggtattttatactattctttgatttgtttgaaattttccataagacagggttttctgttttaactgttttgtattagaaaattatacatcttgttttaaaatagctgttaattttatttgtcaatatatgttaagtagaaacagtagaaatgaaacacgtctttttcccagcactagcatcaaataattattaagcagttaagcttttggtatttctcttatatgtgatttgcagcagatttagaagttgagacattaagcatagaaattcactttaaaataacataagaaagtatggaagaatataatgggaattacataaataattagcagtctgtaatttaataagtcaataatttattgccaacaaactatcattttcattttaccagtttttatcgctgaccaagcagctctctcataagaaggttatgtcttgcagatgagggataggaattgaggagggaaggggaaagggtagattctacaaaggggagttgggtataatttttctaaattacaatctgactgaagaaatatttttcagtgctcagagtcatctacagatgtgcaccgctatcaaaaatacttccttctgcagttctcttccacccttacctattgaatgtagtgaattagatggagatctcaattcattacctataatctttgaagataggtatttagattcagttactgaaggtaagtgtaatctaactaaaatatacaagctatgtgtatagttttcagtatattcttcctaatatacataaaaccattccctaatgtggaatagtttttttccctctctagttttatttatgtttgaggatattagaagttatagttagaaaaagaagtcttaatcatatgagttctcacaccttgttttaaacctgaatctttttttctttggataaaagacttagatgcaccctggatgggaattcagaatcttcagagatcagagtccagtaaaatggataaatatgagactgaagaaagctctgtagcaggactttctagcccagagttgaaagtcagacctgctggtgcctccagtatttggtatacagaaggtgaaaagcagctaacaaaatctctaaaaggaaagaatgaagaatcaaataaatccaaagttaaggttactaagcttatgaaaacaatgaaatctgaaaacacaaaaaaattaataaaacagaactctaaggattctgtggttttggtaggctacaaatgtttgaaaagtacagcatcaaatgatctcattaaatgctttgaaggcaatccttcacatagtcagaaggaaggtctggatcccacaatatgtggatataattttgacccaaagacctacatgagacagacaagtcaaaaggaagctagctgtttgccaactaatacagagagaactgaacaaaagtctccagatattgaaaatgttcaaccagaccagtttgatcctttgaactctggcaacctaaatctttgtgcaaatttgtccatttcaggtaaacttgatatctcccaggacgatagtgaaattacacaaatggaacacaatctggcatccagaaggtcatcagacgattgccatgatcatcaaacaaccccatctttgggagttagaacaattgaaataaagcccagtaataaagatcctttcagtggagagaatataactgtcaaactaggaccttggacagagcttcgacaagaggaaatacttgtggataatttactacccaactttgagtccttagaatctaatggtaaatctaaatctatagaaataacatttgaaaaggaagctttgcaagaagcaaagtgtctttctattggagaatcattaactaaattacgaagtaatctacctgccccttctacaaaagaatatcatgttgtagtaagtggagatacaattaagttaccagatattagtgccacatatgcctcatctagattttcagattcaggtgttgaaagtgaaccgagttcttttgcgacacatccaaacactgatttagtctttgaaactgtgcaagggcaaggtccttgcaatagtgaaagattatttcctcagcttttgatgaaacctgattataatgtaaaattttcattaggaaatcattgtactgagagtacaagtgctataagtgaaatacagtcatctttgacatccataaactctctaccctccgatgatgaactgtcacctgatgaaaattctaagaaatctgttgtacctgaatgccatctaaatgatagcaaaactgtattaaatctaggaacgactgatttgccaaaatgtgatgatactaaaaagtcaagtatcactttgcaacagcagagtgttgtattttcagggaacttggacaatgaaactgtagcaatacattccttaaattcaagcattaaagaccctttacaatttgttttttcagatgaagagacttccagtgatgtgaaaagtagttgcagctccaaacctaacttggatactatgtgtaaaggcttccagagtcctgataaatctaataactctacagggacagcaattacattaaattcaaaactgatttgtttaggcactccttgtgtcatttcaggttccatttctagtaatacagatgttagtgaagatagaactatgaaaaaaaatagtgatgtattaaatctcacacagatgtattcagaaatccctacagttgaaagtgaaactcatctgggtacaagtgatcctttttcagccagtactgatatagtaaagcaagggcttgtggaaaattattttggttctcaaagcagtacggatatttctgacacatgtgctgttagctacagcaatgcacttagccctcagaaggaaacttctgaaaaagaaattagtaatcttcagcaggaacaggataaagaggatgaggaggaagagcaggatcaacaaatggttcaaaatgggtactatgaagaaacagattattcagctttggatggaacaataaatgctcactatacaagcagagatgaactaatggaagaaagacttacaaaatctgaaaaaataaacagtgactatctgagagatggtataaacatgcctactgtctgtacttctggttgtttgtccttcccgtctgcaccacgagagtctccttgtaatgttaaatattcttccaaaagtaaatttgatgccattacaaagcagccaagcagtacttcttacaacttcacttcttcgatttcctggtatgaaagttcaccaaaacctcaaatacaagcgtaagtaatggaacgtaatagtacctgctgctaaatatatacatatatatatacacacacacacacatacacacacacacacacacacacacacacacacacacatatatatataaaatcatagatagtgctaaaggattgagtgtctattttgttgtctggtttctgtaatacaaaagtgcttctttgatgactatccgaaatggagaaatgaacataatatacccttggccagacagacctatagttgctgaatgatcgtgctgttctgctgttctataggatagacattcctgatacagattttccaatggtagttttgtgttagaagtatggaataactgagcttaaaacccttttttcatcagtccctcatttctcctccattaacttccagacaaaagccaagttttatgagtttatctaggaaataaggataatattagttaaatgagtaacagggtagtggaaacttcttgaacttaccagatgctgattgccttcagctaagtcattggtttccagaattgagatttcatgtaccagtaaaatatccagaaaaatctggcgatgatacaggtttaccagcgtgcactggttcttaaaatattctattgcctcagccagactgagtcataatatttggggtaagaggtcttggcatgtatatatatagagagagatttttaaagttcccagattattctgatttatacacagaaattaagatacatagtgtctaaagctagtgaaaccactgaggtaacaatagccaattaaaaaattgtgatatgcagggaaaataaagtttatatcaccgtctggttacttcagattgtctgagtcatcagaaagcaatgatctctaatatagactttatatatttttggccagcttatcctactcagtttagtgttcatcaggttcctcttccagcttcactttatcagtccaaatgatgtatgttaaatagttaataatttttgatgtttgcaatccccaaattggttagattgtccgtcattgcaaacgagtatataccactaattgtatgcagtcacattcccctcttcgttctgctccttcttattggtatttttagagaaaaatacaaataacctaatctgctaaatactgtaactccattctcactgttacattttgtaaatcactccttcccttccatttatgcaagattaaaaaggagcaaaggggataagatttcattacaggataaacatcagattatcacctctccagtccctctcccagcttttctgtgcatacagtgttaaattttgcagaaagtataacttcactcagaatgttttcttagagttgatttcaagtttaaaagaatattttcaagtgatttcaggtttaaagtgttcattgtatttgatagaatatgtactacaaataataaagaaaattactctctgatttctaaatcacttaggtgatgccacatattttcatggttttaaaaccaaatattgttgggtttccacttctacaattctctaaattcaggagggttctaacaactgaatatgatccttagtaaagagtatcttttgtattttgcttcagcttccttcaggcaaaagaagaactgaagctactaaaacttcctgggttcatgtacagtgaagttcctctgctggcatcctcagtaccttattttagtgtagaagaagaggatggttctgaagatggagtacatctgattgtctgtgtgcacggtttagatggtatgtgacatctatggatgtaacccagagcaactcaatatatttttttcctaatagatctcatttagtttcatttagtctttgaactaaaaaaagattttttaattgcttaaattaattgaatcttaaatgcattctgaaacagaaatatgcttaattttaattatcctaagtgtaatattagattccttcgtaagtaaattttccatggaactgacactcatgtgccaacattttgtttaatttgggattttttttttcattatactttaagttctgggatacatacgcagaacatgtaggtttgttacataggtatacacgtgccatggtggtttgctgtcatctacattaggtatttctcctaatgctatccctcccctagtcccccaccccctgacagtccccattgtgtgattgtccccctccctgtgtctatttgttctcattgttcacctcctacttagaagtgagaacatgtagtgtttggttttctgttcctgtgttagtttgctgagaatgatgatttccagcttcatccatgtccctgcaaaggacctgagctcagtggatttttttttttatcttctctcttattgttggttttgccagctgtcacctcctggcagttattttgtctccctttgatagtctttctggttcccttttacctggctgctttaaactttgtgtgctagaaaaatcggtatttctagaagttaaaatttcattaattaagttataaaaattaaattataaatacaggtacctggctttagtgctggggttttatgacagctgttttggttactcaacagtttttttttagatgtaggaactgttagaagatgccaaatatctctagaacaatgcaatattactgtattatgagattctatagcagcaaactagatttttgtggattatgaaaatattaaacaaatgtccctggtactaaattgtcataaaattggagatttttctttaaaaaaaaaaaaaaaaccagactctcaagaaataaaatattctcaatgctaacttttcttccctccctccaaacaataaagtcttcaaagaattatcccccaagaaagacttctggacccagaatctgccagaatctctggcaaattcttttttaaaaattttaagaagcaaattatccctatgttacataaattgttctagaacaatggagaaaaagatagaaagcagcccattttattccttaaagttaacctaaccttgttaccaaatccaataaagatatcacaccaacacctgccgccaaaaaacagtagaccagtctgacataaatatacttaatgggccgggcgctgtggcttacacctgtaatcccagcactttgggaggctgagatgggcggatcacaaggtcaggagatcaagaccatcctggctaacacagtgaaaccccgtctctactaaaaatacaaaaaaaattagctgggcgtggtggcgggcgcctgtagtcccagctactccggaggctgaggcaggagaatggcatgaacctgggaggcggagcttgcggtgagctgagatcgcgccactgcacttcagcctgggctacagactaagactacgtctcaaaaaaaaaaataataataatgaattcaaatatatttaaccaaactctagcacttggaattaatatattagagtaagttactataacaaataaggtttatttcccagaatggaaggataagtaagtataaggaatttcagtaataaaataccctacatcagcaaatcaagtaagaaacttcataaaatttaatatccattcctaattattacagtaagcacaaaactttgatctcaataggattagtctatttccttaatgtgattaagcatatatatttcgagcctatagaaaacttatagtttttggtgaatattagaggtacaacttttaaaatgaagaataaaagaattatctctgtcaatgcattaaatcataaaattctaaaagataaatatcaggtaaaataaaaattcagcagtttataacgacatgcttatattgttagtaaaccaaaggaatccactaaactatttttgaagataattatttttatatttatatatgagaggaattcagaaaaaatgtggaaaaataaatttgccaggcatggtgctggccagcctataatcccagctccttgggaggctgaagcaggagaatcacttgaacccaggaggcagaggttgtaatgagccaagactgagccgctgcactctagcctgggcaacagagtgagactccatctcaaacaaacaaacaaacaaaaattgtggaaaaatagagttaaaagataaaaatagaaatataaacttcatttctcagtgcaaactctgtctagttcaagacacttttgtaagcaattataccagccattctagtaaatttccaagaactgagggtcctgggaatttagtcatgtcagtgccttcttttttacacattaaaccaaagaaaaatggatcccctttacagagtttttaagataagaaaacaaagtagtcagaggaaccaaatcaggactgtaagatgaatgcctaatgatttcccatcaaaattgccctcttcatgagaataatgagtaggaatattgtcatgatggagaaggactctctggtgaagcttttccaggcatttttctgcaaaagctttggctgattttctcaaaacactctaatgataagcagatattatcattctttggtcctccagaaagtcaagaagcaaaatgccttgagcattccaaaacactgttgccttgacctttgctcttaactggtccacttttgctttgactggaccgcttctacctcttggtagctattggtttgattgtgttttgtcttcaagatgatactggtaaagccatgtttcatttcctcttacaattctttgaagaaatgctttaggatcttgataccatttgtttaatatttccattgaaagctctgctcttgtctgcagctaatttgagcacaatggttttgacacccattgagtggaaagtttgttcaactttaatttttcagtcagaattctgtaggctgaaccaattgagatgtctaagatgtcagctattgtttgtgctgttaattgtcagtcatttttaattagggcatgaacaaaatgaagtttttcctcacaaattgatgtgggtggtttactgctgtatgcttcatcttcaacattgttttttcccttctttaaacaagttacccatttgtaaactgctgatttctttgggggcatttcccaataaacttttttgtaaagcctccgttatttcaccattcttccgctgaagcttcaccataagtgtgatgtttgttcttgcttccattttagcagaatgttgtttgataaggtttctttttaaactgatttctttttttttttttttttttttttttgagacagaatctcactccgtcagcagtggcacgatctcggctcactgcaagctccacctcccaggttcagaccattctcctgcctcagcttcccgagtagctgggattacaggcgtctgccaccacacacggctaattttttgtatttttagtagggtttcactgtgttagccaggctggtcttgatctcctgacctcgtgatccacccgccacagcctcctaaagtgctgggattacaggcgtgagccaccgtgcccggcctcaaactgatttcttatccttcttagtgcctcaaactagattctgttcaaacatgttataacaaattagtatgtgtttattttggtgtaaaaaatttttgaaacccatacgtagttttttttatgatgcattttctatgaactttttgaagaacacttgtgtcttatatctgtattgtaagtatatgtgtagatgccttttgagttaattattattaaaataaactttcttagatatttaaatggatttttatttttctcagtctgtgccagtatcaccaaaggaaggtcaacagattaaatctaaaatgcattcacagtttgctgtatgattacctagaatggtgatggtaagacaccatttatagctactgtagccgggagtcaccaaagtgatgtgctaacagtttgataaataaatacactgttaggtagaaaagtgaaagccaccaaaaccacctaagaaacaaactgttggccaggcacggtggctcacgcctataatcccagcactttgggaggccaaggccagcggatcacaaggtcaggagatcaagaccatcctagctaacacggtgaaaccccatctctactaaaaatacaaaatattagctgggcatggtgggatgcacctgtagtcccagctacttgggagcttgaggcaggagaatcgctcgaacccaggaggcggaggttgcagtgagtcgagatcatgccactgcactccagcttgggcgacagagcaagactccatctcaaaaaaaaaaagaaagaaaaaagaaaacaaaaactgttgaattgacattgcctggctaatagaaatcagctttgacataaaaattgagaactctatttcattgtatattgtctgttcacaaatggcataggccataagcttgtctctaaaaactgtaaaaatatgtgatggtgtactttctaccttttactttatctcatcctttaaacatcatttttcattttttaggaaacagtgcagatctccgattagtaaaaacttacattgaacttggattgcctgggggaagaattgattttcttatgtctgagagaaatcaggtacaatatgacagtgttttcagtgaaaacaaacatttttgtaccagtttctacctaaattttgccttactacaaaatgcctgtaatagtagaaataatttttctgatttctatgaaatttaatataaatgtatatccaaaggaaatatatatgatttacattttgacttatgatctcttcacatatgaaatatttctagaatttcacatttctatagaaatatttcattaattaaaccattgtaaacatcttatgtttcatactggtagtgagctaaacaaacaaataatgcaagtattttaagaacactgaacctttttttcccctagaaatttactctctttgctcgttttaagataaaaaaattacactcactaacttctctataaaacattgaacttaaccatactttcagtacctaaattaaaaatgtttatattgttagtttttcatgtgattatacatattcccaaatataatgtatgtgctttgctttctttttagaatgatacttttgctgattttgatagcatgactgatcgtcttttggatgagataatacagtatattcagatatatagtctaacagtctcaaaaataaggtatcttctttaatattatgcaatttatttttatatttctatgaattgtataaaagttaaacagaatttgtgatagggttgtcctattctgaaatataggagactacaactcaaattaatttatagtgaaaaaaagtaaagattttagggaaagatttatatgaaatgtccaaaaaagtgtatctgtagagaagaaaataggttagtgtttgcttagagctggggaagatgggggatggtggggataactacaggatataggatttctttttgaggtggaaaaaaggtcctaaaattgattatagtgagagttaaaactctgtgaatatattttaaaacattgaattgtacactttaagtggaagaagtataggctctgtgagttacatatatgtatatgatatatgtatatgatatatgtatatgaagcaacaaaaatactttcaaagtttgtatactttttttttttttttttttttttttgaggcagggtgttgctcagtcacccaggctagagagcagtggcgccatctcggctcactgcagtctcaaacccctgggctcaggcgatcctcccacctcagccccccaagtagctgggattacaggcatgcaccaccatgtccagctaatttttgtagagatgggggtttcaccgtgttacccaggctggtctcgaactcctgagctcaagtgatcctctcaccttggcctcccaaagtgctgggattacagatgtgtgccaccttgcccagccagattttatgactgctgtatacttttgtgagtcagttttccacaagcaagacatgatgattacaccagtatgagtttcattatttaattagatcttgttaatagatgtaggagagaagagtctttgtttccaaaagggtagaataaactgactatattcatatcccaactaggttagaggaagaagctggttctgcatactgtaagcttttgggcagtttgtttccaactcgaagtatagggaataagaagagagataagcagtttctacctaaagtcattttttaaaaaacagaattctgttaaaatatgggagaaggttcaggtttgttgtttggaggaagagattattttcttgttgtaattattcatttgtggatcttaaaatcttgttagcttttattcatttattttatgatgagaaaaataatatttcaacttatttattcctcctcaaaagtattgtctttcaggttagattgtcagttataatcaatcattttccagaagtgtaatctggttgattgtagactgtcagctaccatcagaattcccacccccactactttaggaagttcagttcgggagggaagtttgtcctgagcgtctcgcaagatatacctgtaagccagtgtttagacagctctcaagctctctttcactgctaattgtccccagggaatcttataccatctgttgtaaaataacagtaagtaaacaggctattttgatttaaaccaggggtccccaaaccctgggccacagactggtacctgtctgtggcctcttaggaaccagacctcacagcaggagcactggggcgggtgagcaagcattaccacctgagctcagcctcctgtcagatcatcggtgagcattagatttgtgaacgctattttaaactgcccatgcgagggatctaggctgtgtgttccttatgagaatctagtgcctgagttggaatagtttcatcccaaaagcatccccacaactcctgtttgtggaaagattgtctttggtgaaaccagtccctggtgccaaaaaggttggggaccactgatttaaaccatttcataacaaaagtgaagtgctagctacataaatattattctttttgcataatcgaagattcatagtaggaaaatgcatatattttacctatgccttgaaaatattgttagtcaaaaactgtccatctttgaagtatagaccagagaataagagaaacagatatataatttccccaagttgtcgtttataaatacaatttcatcattttgtttgaaatgatgaattaagaagtaaataatttgtgtatgtacctaagaaggcaaatatgtaatctagtcattatattattatctttaatacgtacttatatctaagcagttacaaactatgagtaaaagttttcagattaatatgttgtttctataaacatttaaattatgtaataatgaggatcttctatacattctcacattttttccttcaaaatgtggtatatcatttcaaagtatcactatacttttacaacattagaaattttcaaattgttagtattcacatccattttatagtggatcagctttgatttttgtttctaaaactaatgctgtgagaaaattaatttttttttcctcttaaagctttattggacattcgttgggcaatttaataattcgttcagtgcttacaaggccaaggtttaaatattacctcaacaaacttcatacctttctgtctctttctggacctcaccttggtacactctacaacagcagtgctcttgttaatacaggtaaaaagttttattgttctgtattaaaaatatggaatagggagaaaaatatgaacttagtattttctggtgtttattttagaaccagtttgtcacatactggaaatttcgtgaaataaaaaatgtagctaattttctgttttgttatgcacatgaaataagttgataaaagtcattttagaaaatggcttttcttatattgagatggtatttgtcaaaattcacaagagcatttttttctttttttcattaaattctaaatatttttagtaaagttttatcttataaacagttttgtcatcccattacttgaacagataacaaacacctacatttaatacattatcaagttataacattttatatagaatattagctaattttggttcaaaaagagtaaagagatatgagaatataatttttacgaaggtgattcagaatttctgaagaagttaatatgaaagttaagaccctaaatttgattagtatttatattctcatcaacaaatatttggtactttgattttttttttttttttttttaggacagagtctcactctgtcaccaggctggagtgcagtggcgcgatctcggctcactgcaacttttgactccctggttcaagcgattctcctgcctcagcctccggagtagctgggattacaggcatacgccaccatacccagctaatttttgtatttttagtagagacggggtttcaccatgttggccagaatggtcttgatctcctgacctcgtgatccgcccgcctcggcctcccaaagtgctaggattacaggtgtgagccactgcgcctggccttgatttgccttttgtttggcttggtttttcccttagatgtttgcaaaaatgatctataaattagtcaattgattcccactgtgagaataaattatatttaactctgtctcttttcattgatccctgaaaatcttattgctatttcctttaccacttccttttaatgacaaaccataccatttttcctgtatcccatttcaagttggtgatttaaaaatacagccagttctagacttctacagtttgaaaaagaggaaatgagaaaaatgaagtccttaaataatgtataatagaacccaacatgaatcgaatgtagtactttgaatttcattcttcactaaactttttcccagatatgtttccagctatcagttttaaccaattaaaggattgttttcctttaattttctcctgtttccctaatattagaagcaatgaaaatggaaaagaatatttcatagtcttgaaaaccaacttgagtgattgaaattttgcttaatttcctgaagagcaagatgcatttaaatatgggttactgataatataaaaaaataattaatataaaacaaatgatattcagctgttattagaaaacattaaacaatttttcattctaagatgtggtctgtttgcaattagtctattatgtcataactaaactgtaattatagactgatcattctgcataggcatttgacttactactgtatttgaagtttttcttcatcttcttctttatcatttgaacaaatatattgaaaggtataatttttccagtttgttcttcatatgctattatctgtttcattactgaatgaaatagaaatagcaagctgtccatcaaccaccattaattcataattaacctaagcatgcatgtttataaatgttatcggaacatggaaatattttccaaatatatttttgattagccaacaaaaatgctaatttaggcaatgtcatcttttgaagtgaaatatatattaaaattaataatcttggcatatgtttttatatatttcatttcatacttctatatcatatatgactctctaggtctctggtttatgcagaaatggaaaaaatcaggttcgcttttgcagctgacatgtcgagatcactcagaccctcgccaaacttttttatataagcttagtaacaaagcaggtaagtatataataacagtttggaaaatatacatgtgaaaactttttaaaaaataaacatttagcaaataaattatcaacatgtctttctagtggttaaaaaaaagtgtcattctactgtaatttcctaataatgaaacagcaaactcagaactgaaactaagcagttgaaagagatttctttagtctttttcacatgactgtatttctcttttgtgagctacacagctactttgaaattgccctaagaatttcaacatttgtaactcagtgccagttttgttagtctatgtttttagaccatgtttctgcatgtcctatccccgctgttctagctgtctcccaccccaatcctcacccctttttataaactgccacgtttttctaccttcatattatgttatgttatattatattatattatattatattatattatattatattatattatattatatggctagcaagcatttctgaaagtgtcagaaactaaactattaatgattatcctttctacaattctcactactggataaatcttattacttattttttattaactaattattaaacatattccccatcttgcatatatattccaggcctttacaacctaaagttcccaactgctcctttgccatttttactgtctataaataaccttacttctgaccttatgatctccctcaattcaccctcatacatcttcccagcatattttttccagtgtcctttgaaatcctcatttgaggggaacagactgcctttattttcttcgaagaatgttattgccgcttacttctgaaagtggagacgtaactgaaacagatttttttcttcccctcctcgcccccatgtcttcactcccctggctacagagtggagtttggcaaacttttttttaaaaaaggccagatagtaagtattttggttttgtaagccatacaatctctttgcaactacttaacaataccattgtagtatgaaaacaaccacagaaaatacagaaacaaatgagcatgactgtgtttcagacaaactttattaattcaaaaacagcagtagccaaatctcacaggccatgtcttgctaatacctgctatagaagctcagttcgtcgtttactaagtaccacctaaagtaaggaaaatagccctcttgctttccatttctaattgcaatcattactcctccactgttatataaaaccactttatttgaggcttgtatcatccaagctgtgctaccatctattattctttaatataatgacctcctggttatcccaggagaataaaagacattgacacggccgggcgtggtggctcacgcctgtaatcccagcactttgggagcctgaggcgggcggatcacgaggtcaggagatcgagaccatcctggctaacacggtgaaaccccgtctctactaaaaatacaaaaaaattagccaggcgtggtggtgggcacctgtagtcccagctactcgggaggctgaggcaggagaatggcgtgaacctgggaggcggagcttgcagtgagccgcgatcatgccactgcactccaggctgggagacagagtgagactccgtctcaaaaaaaagaaagacattgacaaatgtttgtaacatgattatgtttgggaaaagattctcctcttgggtcttaacgtacttagatctggaatcatttttggtaatttgatgagtcaaccctttagataattcattatgcatcaccatgcctttctcaactccagtgtcccttcattccactccatgttgaactcatacccacggctacactgtagtcctgaaatttcagccaacgttccattctgttactgtgatgtcttatccttctttttctctcactcccttctcatctgctttttagactcatttatgattcctgctacttttttttttttttttttttttttgagacggagtctcgctctgccgcccaggctggagtgcagtggcacgatctcggctcgctgcaagctccgcctcccgagttcacaccattctcctgcctcagcctcctgagtagctgggactacaggcgcccgccaccacgcccagctaattttttgtattttttagtagagacggggtttcaccatgttagccaggctggtctcgatctcctgaccttgtgatccgcccgcctcggcctcctaaagtgctgggattacaggcgtgagccaccgcacctggctaattcctgctacattttcttaagtctccctcccgttcatggttttactcccttcctgactcaagtctcagacttcatggattacttttgtctttcatgtattactctttgtttttctatcctagtcatcttgcaaatctatattactgtttttatacctagcctttgatctcttccaaaaaagatcacacagacatgcagaatcagcagcactgtaggtccacagggtccctatctagttatctttagttagcttcctatctattcccttagacactctcccaaagtttcacctttcctcaaacatcaggttttcactgctcccttcatttctcacagttagctttgcttttgctttctactttatctttgaagttcaagacatttctttctacctaccaacattaattaacctatgttttccttttagttcagtgaaagatttataatctgttcaagaataattaccctctctgttttggaactcataccttctcatcagtatctttaaactcttactctttcagtaattaatcctttaatagataaagttattcccatttcttccatcttaataataataataaatatttctgttgatctcttattctgtacttgtccccctttcccctttttctgagagtgttggggggtagggttgaaccttttgaaagaacagtcactttattactcccccctttttttcacttttttggtttctgtctgcaccactccactgaagcttgccaaatccagtgatctctttgcttttatttgaatattaagacatttaagactactgaaaactccttcttgaaatattttcctttctccatttttgtgggatccacctctcctggtttttttccatcttggctttttttctgcttcctatatgggtttcttttctttccttgcccctttatgaaagctgttcttgtgttttagcctctgtcttctgctcttctcactctgtacattcttcttggacagcatcattccatatccatctttaccattggtagctctcaaatattaatatatatctctagcttgtcctctgtgctgtgctctagacttatacacctagaggcttacttagcatcttcatggagatgtctcatgggtgcttcaaatctagtgttttcagacagtgcatctgtcccctgattacttctctggattccacatctactggaatggcatcatctgcctagtgagaaacttagaaagtgttcttgactctgctttcttatttataccccatatctacagaattgccaagttttaaaacatttaaccttcttagtggctgatggatgcttctcttcttctttgccactgccttagtttagccttcatcacttttatttaaattattgttcaaactggttaccctgccacatgtatacccccttctccccattctcacttcctcgttagacgaaatgatcatccagtgaagccatagattatattggccatctaatatcaaaccatattggtctcatttgaaaatctttcatgatgctttgtggtattcacagtgaagtttagattccatggataagagcatcaagtcctctataatctggtctctgattctctgttttctttttatcctgcacacacacacacacacacacacacacaccctttgctgtggtcatgctattcatggtttttgattgcttgcattttctcatgctttttgtatcacctcatgtgtttttgtatcatgtgtttttgtatcacctcatgtgttttgtacctcctcatgtgtttacccatcttttcagaactaattctgtttaccttctaaaattaaactctaatgccacctgctatcaaaagcttttcttgatgccctatctgatttaatgctcctctactctcagaatactcgctgtatacctttggggttttttgagacagggtctcatgctgtcacccaggctggagtgcaatggcacaatcatagctcactgcagccttgaactcgtggatcaagcaattctcccatctcagctgtcccatatatacttttatgtccccaatcttatgtctccaggactgattttattaatgaatttcaatcctcatttgcctgctagacatctcaatttacatatcaaactgaatatgtctaaaactgtatgtcttctttggccgcctctcctgttgtcctttttttaatggtactgttctctcaattactcctttgaaacaccttagggtcatctttgattgacctcacttctttgcctcccatgtctcaaaattgttaatattatctctgaatttccatagcattatatatcaaccttttaccatactcattatagtttatctcatgtcagttatttttatgtattaacttcctttccttaagtaggatctgtcatgactactcattcccatttcccacatacatattcagtatgtaccatagctcttctagtgtacaccgattgaattaacaaatgaatcaatgatatttttaatattattttcaatattcaaaaacagtttaaatattatatagtaagatgtaaatctagcccatatattcagcgactggtagttccaagtctgaagttacttgaatttgtgaacttaagccctggccatttaaacctacatctgttcttatcctcattcctatcacccatgtcttccattctactcttgaaatatttgatattaatagatttagttattgaaaataccactgcttttgagtcctgttttagctttttcaggattctgccttaaatgttgttcttaatatgagaaagagatttgggaatgattattacatgtactgtctactattagaatcagtgaaaggaaaattctcttatagattgggttttatgattttgtttgtaatgatacagagcatcaatggtaagtttcttacagtatacagaaatatatacttgattgatcaaattacaaaatattcctacaaaatgaaacatggcatatgcttcttatgtgagaaaaacaatattagctagaaccgttgtgtggagctatggagttcataccctttgctgacaggttaggaaatacgtgaaaggcaaagctgaacataagtgttcctgaggtctatgtctttatacagcattatacaaagtaacatttaattagcaataataatagcaacataagaatatctaaactgtaaagaaaatataactgtaaagattagttcaatttttttcttttaagttattaatttattatttgccttatagtgcgtgatctggttgtactagtctaaaactgttaagaaccaaactctgacatcacacataggtattagttatagttcaaacactgactaggctacctaatttaaataaactcgtttccttattggtcaatgagaatagtagtatctcataagattattaaaaggattaaatgagataatatgtgtaaagtgattctgtagagttcaaaacttagtaaatggtaaaaaaaaaaaaatgaataaatgacttaaataagctaggtgcggaaatatcataagctaggtgcggtagctcacacctgtaatctctccagtttgggaggctgaggcaggtgaattgcttgggcttaggagtttaaggccagcctggacactgggcatggtggctcacgcctgtaatcccagcactttgggaggctgaggcaggcagatcacctaaggttgggagttcgagaccatcctgaccaaccccatctctactaaaaatacaaaattagccaggcatggtggtgtatgcctgtaatcccagctactcgggaggctgaggcaggagaatcgcttgaacctgggaggcggaggttgcagtgaaccgagatctcgccattgcactccagcctgggcaacaagagcaaaactccatcccaaaaaaaagaagaccagcctgggcaacatggtgaaacctcatctctacaaaaaaatacaaaaattagctaggcatggtcatgtgtacctgtaatcccagccactccagaggctgaggcacaagaattgcttgaaccagggatgtggaggctgcagtgacctgaggttgtgccactacactccagcgggggatagagccagactttgtctcaaaaacttaaaaaaaaataaagcccactagcgctaggcacagtggctcacgcctgtaatccccgtactttgggaggctgaggcaggtggatcacctgaggaaaggagttcgagaccagcctggccaacatggtgaaaccccatctctactaaaaatataaaaattagccaggcgtggtggcgggtgcctataatcctagctactagggaggctgaggcaggagaatcatttgaacccaggaggcgtaggatgcagtgagccaagatcgcaccattgcactccagcctgggcaacaagactgaaactctgtctcaaaaaaaaaacaaacaaaaacaaacaaacaaaaaaaaccacgagtattatagattacagaaattgacttttacacaaacaatatatatctatcttaggaaaatttttttaacagaacttttatctaaatgctgatattactagctataaaaattatttgaatgacttaaaattgtttttatgttttaagatttctctttgtactcacgagtttattagtatatacctgaattgaattaatatccattctgggaaaaaacactaaagagtactattttctggctgggcacggtggctcatgcatgtaatcccagcactttgagaggccaaggtgagtggatcacctgaggtcaggagcttgagaccagtctggccaacatggtgaaaccctgtctctactaaaaatacaaaaaaattagtccagtgtggtggcgcacacctgtaatcccagctactcagaaggctgaggcaggagaattgcttgaacccaggagttggaggcctgcagtgagccgggatcctgccactatactccagcctgggcaacagagcaagactccatctcaaaaagaaaaagagtaccattttctagtaattgtgactaatgcattggttaatactaaaatactggaaaaataataatagctaatacacatgtaacatttaccacgttctaggtgtgatttaaacacatacatattagcttatttaaccctctagggtaggaatattgtccccactttgcagatgaggacactgaagcacagagagattgaatgacttgcctgaggtcacttagctttatgaaaagccagtaagcattcgtgcatggttcacactgcatcatgttaagccaataatatacattttcaggaacttaaaaagctacttctaatagcacttttaaatatcaacaagtatttcaattgattttaaaattacgttgtagagattgaaacaagtctctcgaactatttcatgtggggtgttgggttttggggtttttttttcgggggggcatatctagtgaattgtgagaaatgagtagtccatccctagaaagttgctatgcctgtatatttacatataattactttattcacaaaatagaatatataggttcacagcaaacaaataagttaaataaaacaggaaaacatagaacaaagaaaaagagtacttaaccaatatgctattctcaagtgttttaaaacaatcaaaagtgatcatttcttttttatattttattattctaaagctacagtcttggatgccctggtttgattattgcttcagtttcttctgaacagcgaattttccgttcttttggaaaagcctaaaattacttgtctaaatcaaaatccagccatttgcccttttgccttttttatttaagcaaagcctcttctgtgggtcttccttttgaaacagtctttttctatgcaacatatcattagttaatagctttccttttattgaaagctgttcattattttaaaatgaagaaagctttttaaaagcctaaaataatttgtgtgttttgtaaaacaattgagaaatactgtattttttataaaaatcataaatgtattgggtgagaaattaccttttttgtgaacacaatagatctggtaaagggttacagaaatgttacttttaaagggaaattatctattttgattaaggaattacaattataaacattcattaaatttttatagcaacttttgacaaaacctgtggtattctacagattgctaacagaatatgtaaataatttgcaggtggcatacaagcatctcagcattggatagcagggaaaagaaagatgaaggagctagagcaatgtggaaagtaaaataaatgtataatatatagacattagatgacagcagtgttgaagtagtcaagattatattactaaagcagagagaggaatcatggccactctgacattccataatgagggctcaaaatagccaaaaaagagtctattcattgttggaatttcaaaaacaatatatccttattttaagatcttcctaaaaatacctgcttagagtctttttaccagctgttgaattctgacaaataaagtatagaaattaaataaaggtcctgctgtcctactgtggcacaaaggactctttgtatccaggaggttacaaagggatttaatcttaggtatcacttttgatatgtaaataatatgtatattttgtttctgaaagtgcgggaaagaaccagcatcagctaacattattttaggaagaaaattcattcaaatttatttaaaatgagtaaaaataagaatagtttaatattgttaagaatatgttttaaaagtacagagttttcttagcttcagcactattgatattctgggctggagaattctttgttttcaggggttgtcttgaacattgtagcatgtttagcagtatctctggcctctgcccactagatgccagtagcacatacacttttccaccttcagcagtgatgaccaaaaatatcttcagatgctgcagaatattccttggagcagaaaatcaccagtttagaaccactgctttagccagttccagaaagtaaacacaaaatgactcaaagtgaattgcattaaaactctgaagttttagaacaaatgagtagccagaagaattggaaagactttagactatgaagatgaaagtttcaattaaggtgttcatatatcaatcatgttattatatagtccagagcaatatggaagatttaatctttttcttggtaaaaagtaacaacatacttacagatttttctggttaaaccatgtcatcctataaatagggaaatcttgtcactttcccaaattaaaggtaaccgttcaacaaataattagccacttgaggggctcagtgaagtattcacccacggactagttaactacgttgtctttgagaagctagaatcaaggtaggtgtagaaaagataaacctagaatattagctcccaaaatagacttcagacatttttgttggctgtacttcaactcagatgaagtactgctgtaattcctaccagcactgctcctctggagcttgctgtgcttcactttgagtttctgccttctgtagccaacactggtagacaagaaattgaagccaaaaggttcaaaaagggccataatatatttaactaacttggttcttggctaatataaaaagcaaaccttctgtgcaaaagcacaatatcagtattaatacactttttttaaataactagaaaactggttaccaagtttaaaatgcatttttaaagtacagtactgtcgtaagaatcacatttagaagtgtaacaacatagtgtatttaatcagtatcagaatttttaaatttattttatcatcatggaatctgagagtgaaagggtatctttgaaatcctctgactaatctttactgattttgcctgcttccactgagctgcgtgaacatgaggagccatagacaccctgcagggatctcagtctaaagcagtaattccaaaccttagtgttgtttctctagagaagtacatcagaatctctgtaaagagctattttgaaaaatgtctttaatataattttatgaagaaatatataatgccttttattcttacaaatatagaaatcttttaaaaatcttaatcagtgggaaatttgtgaggaagttttaatgatcatgtaatctggcaaatacataattcattcacagaccacacatctggaggtgacaggtaatattgtttatgcctgagtggtataatgtgtactgctgttcctaatacataacaacccaaaagaaaaaaatggacaaaagagaaaagaggcagttagctaccaaaaaataaaattaaaaattaaaaaatatatatatatggaaggccaataaacaataagttaatcatttttgccattaggttggtaaaatttaaaagatgctatacagtattgatgagtgtgtgaaacagaaaccttcatatattagtggtggaaggagaaattttattatctttttggagagtacatttatcagaattttaagaacatactcaacaattccacttttggaatttttcctacagaaatctcacacaatgaggtaaaggctattcattacagtgttatactttttttatgtcctctcccttctgaagtggaatcgacataaatgtcctttgctagggaaataggagacatactaaaagttaatcctggtaattccatgtagtagttaaaagaatgagataaatttatttatacaaacatgaaaagctgtccccaaaatattaagtgaaaaaagacataaaatagtataaatactataatctcagttatatttttaaaatgaaaaataaattgtgtgtataccaagaaaggaatttgggacaaaatacagacatgccttggagatactgtggatgtggttccagatcaccataaaaaaaggtgagtcacatgaatttttttggtttcccagggcatataaaagttatatttacactatactatagtcaagagtgtgtaatagcattatatctaaaaaaaagtatgcatactttaattttaaaatactttattgttaaaaatgctaatgattatctgagccttcagttaatcataatgtttttgccaatcagggtggtggttgctgaagatagaggtggctatggcaatttcttaaattacaacaacgaggtttgctgtattattgactcttcctttcacaaaagatatctctgtagcatatgatgctgtttgatagtattttacctgtagtagaacttctttcaaaattagaatcaatcctctcaaaccctgccactgctttttcaactctttatgtaatattccaagtcttttgttgtcatttcagcaatgttcacagcatctttaccaggcatagattccatctcaagaaaccactttctctgttcatctataagaagcaactcttcatctattcaagtttgatcatgagattgcagccattcagtcacatcttcaggctccacttctaattgtagttctcttgctatttccaccacatctgcagttactttcttcactgaagtcttgaccccctcaaagttatccatgaaggttggaatcagcctcttccaaacttctgttcttgtagatatttgacctcctcccatgaatcatgaatgttcttaatggcatctgtaatggtgaattttttccaaaagcttttcattttactttgctcagatccatcaaaggaatcactacctatggcagctatcaccttacaaaatgtatttcttaagtaataagacttgaaagtcaaaataactaatggatcacttgggctgcagaatagattttgtgttagcccacatggaaacatcattaatctccttgtatatctccatgagaggtcttggttgagtagggggattgttaatgagcagtaatattttgaaaggaatctttttttctgagttataggtctcaactgtgggcttaaaatattcagtaacccatgctgtaaacagatgtgctgtaatccaggctttgttgttccattaatagagcacagagtagatttcatataattcttaagggctccaggattttaggaatgataagtattgatttcaaggccccagctgcattaatccgtaacaagagagtcagcttgccctttgaagctttgaagccaggcattgattcctttctatctatgaagtcatggatggcatcttctttcaatagaaggcaattttttcaacattgaaaatctgctttttagtgtagtcttgtcatataccttagctagatcttccagataacttgccatagcttctccatcagcacttgctgcctcaccttccacttttatgttatggagacaacatctttccttaaacttctgctggcttccagctgttctgtgcagcttcttcacttctctcagccttgagataattgaaaagagttagggtcctgctctggattaagctttggctaagggaatgttgcagcaggtttgatctttcatccacgccatccaaaccttctccgcatcagcaataaaactgttttggtgtctcatcatttgtgttttcactagagtagcccttttaatttccttcaagaacttttcctttgcattcacatcttgactaactctttggcacaagaagcctgcttttcagcgtgtcttggcttttgatatgccttcctcactaagcttaatcatttctagcttttgatttaaagtaagaaacagagccaggcatggtggctcacgcctgtaattccagaactttgcaaggccgaggctgggaatctccgaatcctaggagtttgagatcagcctgggcaacacaatgagcacctatttctacaaaaaataacaaaaaaaatacccaatgtgctgtcgcatacctgttgtttcagctacttgggaggttgaagtgggaggatcccttgagcccaggaggtagaggccgcaatgagtcatgattgcaccactgcactgtagcctgggtcagagtgagaccctgtctcaaaaaataaaaataattaatgtgagagacgtgacttttccttttgcttgagcatttagatgccattgtggggttattgatcagtccacttcccatataattgtgtctcagggattagagaggcccaaggagagagggagagagactggaaatggccagttggtggagcagtcagagcatagtccataagttcactgtcttacataggcatggttcatggcattgcaaaacaattccaatagtaacatcaaagatcactgatcacagatcaccataacagatataaaaataatgaaaaagtttgaatattgtaagaattaccaaaatgtgacacagagacacaaagtgaatatgtactattggaaaaatggtgccaatggacttgctcaatgcagggttaccaccttcaatttgtaaaaaacataatatctgcagagcacagtaaagcaaagtatagttaaacaaggtatacctgtataaaactgattgctttaaaaatattgaatttgaaaaagttaaaccttttaagtgtacaatcttctggagttgtaaacaatactaacaaacatctggcaaaatgttatattactatgaattttcagaaagaacagacatcagtgacattaatttatacataatgtatcttatataagtaatccaaatacaattgagcctggtttctgctttatataaaccctttatataaaccctttatataaacctcagttaagaaaaatgcaaaaaaatgaggcatgcctgtacacaactgttagctgtgtccttagtgaatggcagcaggagcggcggggcgagggggaaggcaagaggaggtagtaaagggggaatagttgaagattctttttttttttttttttttttgagacggaggcttgctctgttgctcaggctggagtacagtggcgtgatcttggctcactgcaacctccgccttctgggttcaagcgattttcctgcctcagcctaccaagtaactgggattacaggtgcctgccaccgtgcccagctaattttttgtatctttggtagagacggggtttcaccatattggccaggctggtctcaaattcctgaccttgtgatccacccagctcggcctcccaaagtgctaggattacaggcacgagccactgcgcccagccaaactgcttcagttctaaaaataaaaaagggtagggagagagagagggaacacagttatatgtcacctatccagaacccttgagaaatacgcatttcaggagccacttacagaattattaaaaatcaaatctgttgttagccagcatatttgagagcctactgtttgttcagcactaagcactaacatatttttaattttttttaacttggagagaaattagtaaaatattttacatctttttttcaatatagagcactaaaaatagtttaacccagcctcctcttccaacctttttcacatcaggcatcaatagcaaatgattatatttttaaagcacaattggggaagccattattagataaaccagtgaaccaaccatgttgctccccccagcagaggagaccagcctggggacttcagccatgcccagtcatctgagaaagctaaccagatcagtttctggacccacctataactgcacaccatagaagttctcctttaacctgttgatttgtttacattcattaacaatagttccatactacgctgaaataaaatggtattctcagagatacagcattttaaccctaaactaatcagtctcctgatccctagtccaatgtgtcctttattctcaactagactgcctcaacttgataagttcctagttcccaccaaaagttagggccagattttgatgttacagactacttagctaaattgagtggaccttaatatgtgggagccaatattgatattttttgagggaagacacatactttctaatataaaaatttaatctgatactttaaacagggacagatcaaagatatggtcacttttttatccctcccagacatgttgcataacttaatttttataatggatgtgaaattttctaaacgttacaatgaaatcttttttttaaaaagaagcagatataaatttaaaattcttccaaacaattaaaaataaaatttaatttgaaagaaacatataaaataaaactctcaggaaagaaatttataatggaagtcatgagaccagcaagtagagaatagcagtgatactggtaagaggagaaagcaacatgtactacatatgaagcaagccaaacttgatgttgtagtatatatgagggaattaataattaaaggtggccaatatttctcattggactagaataataataggcttatagaataaagaatttaagaaagatagcaagcaaaattttggaaatagaatttggtgttaggcatagtgcgtattaaagtgacacaaagctttgtgtcaaggtatctggcaagaaaagcaggccagaaatttagatttgaggagcagatacaaaaatgataattagagagatgagtaaagaataaaatgtcatatatgcctgaaaacaaagtaagttttgttttctctcctaaaattacccatcagaaaagagagtgctgccttatattgaaatcactaacacaagatgatttctcagttactttatttggacttacttggagaagatatactggcctgaaataaccattgtatttcggatgtaaattcaggctaccaggtagaattaaaatttggtcaaataagatgaggcctgagaattgatccttaaatttttagcattgtctaggtcattggtgatcttgaaagagcaatttacatggagtaattaggaagaaagacttctgggaataggttcagtaaagaacaggaggaaaggaagagaagggagacacgtagaaaactcatgaagaattttgctacaacactgtgccaagaaatgggtaacagcagaggagtataaggtccaggtacaggttcatttatttggttttggggggtttttttggtttttgttttttgagacggagtctcttttgtcgcccaggctggagtgcagtggcacaatatcagctcactgcaacctccgcctcctgggttcaagcgattctcctgcctcagcctcctgagtagttaggattataggtggctgccaccatgcctagctaatttttgtatttttggtagagatgggtttcgccatgttggccaggctggtctcgaactcctgacctcaggtgatccaccctcggcctcccaaagtgctgggattataggagtgagccaccatacccagccattaattatattttcataaaatataacatctcaactcattctattggaattacagatttagctcattcaatttataggaaatgtgtgccataaaatccaattggcaaagccatttctcactgtcataaacagtcaagtcaaattgactttttgtcagaaaaagttagactttatattttgcttggttttccagagacttttataccctagggccatataccttaataagatctgaagtagattggagagataatatctttctcttgtaaagtgggaaaaagtcaagtcacttttagaaaaaaaacacatctggaggttgggatctggaaatcaattttctttttttcttttttatttttagagacaagctcttgctctgtcacctgggctggagtgcagtgctacagccatggctcactgcagcctgcacctcctgggctcaaggggtcctcccacctcagcctcctgagtgagactacagttatgcagcaccacacctggctaattttcgtagagacaggatctcacttcgttgcccaggctggtctcaaactcttgggctcaggcaattttcccccctcgacctcccaaagttctgagattacaggcatgagccacctcgcccagcctggaaatcagttttcttaaagctatacacacctatctacaccatagagagtcttagatgactccaggggtaaatgtatgaatacctgtgctctaggacacatagatgattcccaaagtagtactgataatgatgaagatattagtgttaaattgtgtcacgagatgtgagaatgaaggggggggagtcattttttcttaatattttatacaatattattttaaatatatgttcaattaacttctataatagatacttgattatttcatttatctccttaggattgtatacattcaaaatgtcacctcccccaaaaaagtggtataatctaaggatggccttatttttggcatagatagtatcatacggtcacacttggctgtgtgtgaatccatactcatctcatgattaagatccttaggccaggcatggtggttcattcctgtaatcccagcattttgagaggtgggcagatcactttgaggccaggagttcaagaccagcctggccaatatggtgaaaccccatctctactgaaaatgcaaaaattagccaggtgtggtggcccacacctgtaattccagctactcaggaggctgaggcacgagaatcacttgaacccaggaggcagaggttgcagtgagccgagattgcaccactgcactccagcctgggcaacaaagtgagactctatctcaaaaaataataataataatttaaaaaaagaaaatataaatcatattaagcaagtgttaaaaatgaaaagaaagtaaaaagctttaaatgatgtactgtgaggtgttttgtttgttttaatggaagagtataattttgtttctttggaaatagtcctaaatattgatgaataccttttggaaggtaagaatgtcatggaatactttctatagaacattagtccacatattctgttcccgcctatctccacaccactgagcaacagtgcctgctcccagtgcaaacacacattcttatatcagcatcaagactacataacagtgaggtgggtttttttgtagagaacatacagaaatttggagaaaggatcatcaagtattgacaaagtcagaaacttagtactgctaaggaaatttattttttggtcacttaatatgatactaataacttgtttaaaatctagttaactactgcattataatttattatattctattcacagggcttcattatttcaaaaatgttgtgctagtgggatccctacaggatcgctatgttccttatcactctgcccgcattgaaatgtgtaaaacagctttaaaggacaaacagtcaggtaatggaataaaattatttcaaagagttataggtattaatgagctctttccaaaatttttcttgtagtcactttctctcgtatctgtcacccttctctttcctgttacttcctttccacccacttatattaacagctgtcctttttccattcttctcacctgccacgtgaactgcctttaccaatgaagtaatactttcatctaattacaaatgcctctccattttgctgcctcagaagtagttcatactttgatttcctctgaattaatgggattgacaattgtagtcatccttgtcatatgttctgctgtacctcgcttttacgcaaaggtggcagcaaggatttgcccctctttactgatagtaaatgataaagactttatttgttcttttgctatttgtgaataacaaaataaatttaaagtatagccatttggagccagaaggaaacttgagtcctgtttactcattttataactaaagcccagagatactaagtggcttagcccgaatcagttaattacagacttaggtcaagaacctggtctccgggcgtggtggctcctgcctgtaatcccagtactttgggaggccaaggcaggtagatcacctgaggtcaggagttcgagaccagcctggccaacatggtgaaaccccgtctctactaaaaatacaaaaattagccgggcgtgatggcgggtacctgtaatcccagctacttgggaggctgaggcacgagaatagcttgaacccgggagggaaaggttgcagtgagccaagatcatgctgttgcactgcagcctgagagacaagaacgaaactctgtctcaaaaaaaaaaaaaaaaaaaaaaaaccctggtctcctacctctcaatattgcctcagatccgtttttggaatgaggctgattttaaactcttaatcctttatttttctacattgtgacggtgaacagctccttaaggcaagaactgtcttaagcacatttttattgacagtgcctaacatgctgcctgctacatggtaagtactcctttattgtacatttgtgacatcaaaataaccttttcttaacttctgttctagcaaaggctagagtccacctaaggaaaaaattcagaagagtcttaaccttcagatgagtagctgaaactagataaatgtcccttattttaatagtgaggttctgtgacattggggaacaaggggaatcaaatgatgaagacatgtttagacttcttcctgtattaacatatttttaaaatagcatggaaccacaaatccaacctgactcaaaatgaaaactaagaggagaggtgggagtaaaaagttttttgatgagtatgtattaagtcagtctttctcttaaacacctctcttttctatatctgattgtacttctgtgtacttttcccttcttgtcattcctcaggcagcatcctacctgtcttctgaaatttaatatttacctctctaaagctcacacgttccatggacactgttagtactcatttattagtatatagtaatgcataagcattgtaaacaatgttttgccccttagaaggcagtttatacatttatgtggatgtattctaatcgttatcttttatgtgcttagtatgacctcagtaaatccattgtaagaattagctaaacattgtttgggcgcagtggctcatgcctgtaatcccagcactttgggaggctgaggcaggaggatcacctgagtccaggactctgagactagcttgggcaacatagcaagaccccattctaccaaaaataaaaaattagctaggctaattaaaatggtggtgcacgcctgtgtggtcccagctacttgggagggttaagatggaaggattgcttgagcctgtgatgtggaggctgcagtgagttgtgatcatgccgctgcattccagcctgggtaacagagtgacaccctgtctccaaaaacaaaaaaagaaaacaaaaataaggagagaggaacacaagtactaaataaacctatagaccaaacagaagatcatgttacttgagccaagctcacgttgttcatctgactataggaggttgctgttctttcttaaaataatttggaaattttgactgccacagaaacatctttaaagtatttgctgtaggccaagtttataattttgccttatcaaaatgtctcaccatgtctagcttattttcataattgtttaatgagttataagtgacttaacattaaagaaaactatttctttgttataggcattgctttgagttaaaaataccaaatttcggctgggcgcaggggctcacgcctgtaatcccagcactttgggaggctgaggcgggaggatcgcctgaggtcaggagttcgagaccagcctggccaacatggtgaaaccccaactctattaaaaatacaaaaattaactgggtgtggtggtgcatgcctgtaatcccagctactcaggaggcggagacaggagaatggcttgaacccgggaggcagaggttgcagtgagccaagaccacaccattgcactccagcctgggcaacaagagtgaaactccatctcaaaaataaaaaaaaaaaaaaatcaaatttcaagaataatgtataataaatttgttatttccacttgactagataatgtgattacttacattttctataaacagaaccaaaaatgatagttgaaggaaaattaaacctttttaaaaagagccatttttctgctttatatggaaataatgtaactaaattttataacttatctaaaaattggcatagtttttttattttcagttactattgtgaactaattttccttttttctgttggttccataggacagatctattcagaaatgatccacaacttgcttcgacccgttctgcaaagcaaggactgtaatttggttcgctataatgtcatcaatgcattgcccaatacagctgattcactcattgggagagctgcacatatagctgttcttgattcggaaatatttttagagaaattctttctggttgctgccctcaaatatttccaatagtataaaagcattgttagcgactggacaattacctcattcaacaatgtttcaaataatgtattatattaaaatgtagatgctgataagttctaagaaatatttatacctttttatatggaagataatttatatcatccatgtttagtgctttttaaacatcaactttactttctaggtaatgtggctgtgcaatatttttttaattttatctttttacttttctattactttttcatatattttgctacctaagtatttcagtgaaactttaagcccatacctgtgtctgattgtttattattggctttccacaattcttacatcagactacattatattagagaccattattgctagaatagcatgggatttaaaattttctaatactgggggtattatttagttaattataaatttttcttttcacattttactgtgttttaactggaaataaaattatggctgctacaatatattttttgaaatcaacttctgtagttctaaaatacaactttatcatacaatcaaaccaggtagttcatataaaacagtgtaatacaagttttctataaagtcattactgttgcttaaacatatttcatgcctattaaaatatattttctactggtgatttcaacattatttctcatactgacttttattactggaaatgttcctgtacatgttggcagcagataaagatttttgaatgtttgaatgccctctgccttgatttggttggaatttttgctaaattggtaatgttgcttgaactttatgactacattttcttttaacttttttcatggacttccttatatgtacataataattaaatgttgaaatttatgaaatacttttatgaatttagataatttttaaatattgttaaaatttattgaactaaaaagtaatgtaaataaaataattcatgttaaagatggaacaaaataattaactttacatgtttggtgatacagatgcaaatgtttttgatatatggagatgttgagtcttttgactttactaaaggtgctgaatagcattaaattcactattttccttttctgttttacttgtgaaaataaaaatgcactaaggttgggtagaagttctgtttgcactcactaattgtgacagacagaggtttttgtaagtatttattgtacaattgatgcatgtttatttttagcgttgttattgcctctggtgttaataaatgaacaaatggctatctggaggaacagctacaacccttgtaatcctttgcttattctctgaatactagaggtatatatattttatttataacatagaccagcctaattatataacttgtagcctttgtatttttatatcttttgtatatattattatagttaaaataattttgattgctattgataattatttactttttagaaagtactcaaaatttttataaactaatatcccaagtgcattataactagaaaatgtaaatatattaattagccaccacatatttttgccaagcacattttttatattcctatatcttggctctgagtttgaaatgtgcatattcaaagtttggataattttcaggtttatcaaaggactcaatcatataaatagtatttgagtggaaattgctcttatcatagttgattgattagtttttggttattttaatacagttctaaaagcacatctgtgttcatggtttaaaatctaacaaatttaacttacttgatttatctgggaaaccaccacacactattcacctccaaattcagattgtgggagatggggtacagttatgggggagagaggaaacaatgatctgaaatggtattattgactcttactttagagaatgaatctcattgaagtataccagtaagagttcttggttgcaaacaacaaaaaaaattatgatc

SEQ ID NO: 59315 - DNA, 1867 bp, Homo Sapiens
gtgtgtgtgtgtgtgtgtgtaaatgggatcttgctgtgctgcccaggttggctggtcttgagttcaggtgatccacccacctcggcctctcaaagtgctgggattacaggtgtgagccaccattccgggccctaaaacagtttttttagctcgtcagctatcgttaatgttaatgtattttatgtgtggcccaagacaagacaattcttcttccaatgtggcccagggaagcccaaaggttggacacccctgaaaattacatatcttctccaacagagtgttttgttacaacagccagaagcctgatgaaagatttatactgcttgggacaagttttaatgattgttaatttttactttgaacaaatagtgaatgaaataatagatttgacattttttaagataacaagtgctaggaaatatgaagtgtgagtaaataaaaaggttcatatgttattagaactaatcattttgatgttatgcatagtgattactagaataattcccagagtttctttgacagagacgtcacattagtttaacttaccaaaacagacagaagaaatagaaaacttgagtagtcctattaaggaaataaaataattgaatcttttctacaaagaatattccagacctagatggcttcaatggtaaattctgtgaaacatttaagaaaaacaaaaaacaaacaaagaaaagaagttggagaagctttttcagagaatagagaagaaataaatacgtagacttattttatgatctcagcataacattgatcacattacatgccaagggcattataagtaagggaaacaataatttagtgtaattttattacattaaaattgaaaacttctgtctgggtgtggtggctcacacctgtaatcctagcactttgggaggccgaggtggagggatcacttgagctcaggagtttgagaccggcctgggcaacatggcaaaaccctgtctctactaaaaatactaaaataagctgggcatggtggcacatgcctgtagtcccagatacttgggaggctgaggcacaagaattgcttgaacctgggaggtggaggttgtagtgagccaagattacaccagtgcactccagcctgtgtgacagcgagactctgtctcaaaaaacaaaaaaagaaggaaaacttctgttcatcatgaacattcatgcaaaaatactgagcaaaattatagcaaaccaaagccaatgatatatgcaaaatggtaatacatcatgactaatttagatttttttctaggaatgcaaggttggtttaaattttaaaaatcagtcaatatgattaacaaaataaagtaaaacctctgttaaagtaaaaccattaacagaataaagtaatagctgcagcaacaattttgataaaatttagcactataaatgattaaaaaaaacttttggcaaaggaggaatagaatagaacttccttaatctgtccaaaggttatcaacagaacactccacagccaatattacgtaatagtgaagtattgaaaactttcctcttgatatcaagaatgagattaagatgatcattatgggccaggcacaatggctcatgcttgtaatagtagtactttgggagtccaaggcaggcagatcacttgacgacaggagttcgagaccagcccagccttcacggcaaaacctagtctgtactaaaaatacaaaaattagtagggtgtggtgatgcgctcctataatcccaactactcgggaggttgaggtgggagaattgttggaacccaggaggcagaagttgcagtgaatggaggttgtgatgagctgggattgcaccattgtactccagcctgagcagcagagcaagactctgtctc

SEQ ID NO: 59316 - DNA, 449 bp, Homo Sapiens
  misc_feature (42)..(42): n is a, c, g, or t
  misc_feature (56)..(56): n is a, c, g, or t
  misc_feature (75)..(75): n is a, c, g, or t
  misc_feature (380)..(380): n is a, c, g, or t
  misc_feature (436)..(436): n is a, c, g, or t
  misc_feature (442)..(442): n is a, c, g, or t
aaaaaaaaaagtctcccatgttggctaaggggggtctcgaantcctggggtcaaantgatccacttggccttggnttccccgaaatggcggggattaaaaacgtgagccactgtacccatgattctttaagaccttcagcagcccatcatttcaagatgatatggtcttatcccctgaactaggtatctgacctcaatcatagctgagtcccagacttccaatgaaccttacaccccaccactcccccagtgatccttcatgttgatgcacaatcactcacacaccctcgcatgagcccagcacttcccaccctcaaccatgctttgatcaactgcagtctggttccactgtggccatggagcttgtttagttacatgtnttcccacaggggctgccctggcaccccaactcccaatttaatgggttctgggatancaactngtcctct

SEQ ID NO: 59317 - DNA, 1704 bp, Homo Sapiens
acgcagcgcggttgctgggcacctcgactatcacctgaccgtagtaatatctcccgctacgcgcgttgtgaccaatgctgcatacaggagatgagggaggacggccagacacctggaagccggaaaatggtgaaaggcaggattgggaaccccacagaccgcagctcctcccaggagaaccccacacatgagtctggatcctcgccatgatcctcccgtggcccccacacaatctggggagacgcggggccgcgggcactgcgctgccgagagggctccggactgaggctgcagttgctgcgcagggacggctcaggatgcccggggtcccggctgctggcccagccccaccctgtggccgaggggacccagggacgagctgcgccagggagactcgggtccgcagaccccggaatcgctgctgacaggcccgggtcccaccacagcaggtcccaaccagcccctcctcccacccggccttgcacactcaccatttcccggctcccaggtgtcccgggtcctcccttggctccggagatcagtgctggtcaccaccggacagaagctgtggtggagccacctcggcctctggaaggctgaattcagtgggttaggggaacaggagccccttagacttgcggagcttggccccaccctcctggcggagcgcctgattggataattcacacgaccccgcccagtacccctaggataggaatcaagccccaccccctaggcccgggtttcaggagaagccacggaaaactcggaagtgtggagcaggattgacaggttctagcaacagccctcccacccccccgcccaggccaggcttccttctggagcttggacgtgaccccacactggggacatttgcatttaagaaaaacttggctccaggctttccacagtgggccctggcatcttcctatactcactgggccctttctgtttcttccttctggacgggggttcacaagtgtgagcaggcagttccacactccgtgtccaattgagccagtacctttgctggaagctactgggctggaacaggagggagagcccagatgtcttccagggatcaggaatttgggataagcggctggtggcatggccaaggcttcctcataccttatctcagtctacccattttcagggaagaaaatgaaatatgccaacaagggaacaaaaattaagtgcatggaaaaaagttatactacagcaatattctgtaaagaaatcaaaaggggccgggcgcgatggctcaccctataatcccagcactttgggaggccaaggtagggcagatcacatgaggtcaggagttcaaggaccatcctggctaacacagtgaaaccctgtctctactaaaaatacaaaaaattagccgggcgtggtggtgggcacctgtagtcctagctactcgggaggctgaggcaggagaatagcgtgaacctgggaggcggagcttgcagtgagccgagattgcactactgcactccagcctgggtgacagagcgagactccggctcaaaaaaaaaaaaaaattaaaaactggccaggcacattggcacacggctcacacctgtaatcccagcacttcgagaggccaaggcaggaagatcccttgagcccaggaaacctgtctgggcaatatagtaagacctatatagtaagaccttgtctctccaaaaaaaaaaaaag

SEQ ID NO: 59318 - DNA, 3161 bp, Homo Sapiens
atcaagaccagcctgggcaagtttgagagaccctgtctgtgttagttcattctcatggtgctatgaagaaatacccgagactgagtaatttgtaaagaaaagaggtttaattgatgcacagttccacatggctgagaaggcctgaggaaacttataatcatggtggaaggcacctcttcacagggtggcaggagagagaatgagtggcaagcaaagggggaagccctttataaaaccatcacatctcatgaggactcacttactatcatgagaacagcagggggaaactgcccctgtgattcagttatctccacctggtcccacccttgatacctgaggattattacaattcaaggtaagatttgggtggggatacagaaccaaaccatatcactgttatctacaaaagattttttaaaaagtagccaagtgtggtggtatgtgcctatggtcccagctactctggaagctgaggtgggaagaacttttgagctcaggaggtcgaggctgcagtgagccatgattacaccactgcactctagcctgggtgacagagcgagagaccctgtcccaaaaaaacaaaaaacaaaaaaaaaccccaagctaaaaaatttatatacaaaaacctcagcatatttgtcaaataactgtgtcagtgagttcttaagcattttgttttcatataatataaaatattttatttcctgctgtctttctatgtatacaaataaccaagttgctagtttctttgttgtatgagcttttatgtaatttatggcatttccatttgtatgtagctgtaatgaactttgtctctgctttgttccttaccatggaaatgggttttttccccctcagatggattcagacaatagttctgggtggtaagtctccatgtaaggagttagcccttctatttacaaaggctgtccttaatttcataggtaatgtttctggaagttcagccattgacagaatgttataagagaaggttcttatcccacagagctttattatacattctctaatttcattttgccttatcattaatatatttttagtgtgttatacatgttacttatattgacttttcctttaacatttaaatagtgttgatgcaggatttttcttggcccctttgctgggctcgcaggagcaggtgccccatttactcagcctgccaggccgcatctggcttgcactccagtgtggatcccacagctgccacaactgcacactcagcccccacattcagtgggtcccgagttcttgtcccatgtccaagaagaatgaggtctcactgacaattgaagggtgatgaggacagagaattttattgagtgatgaagcagctctcagtctagagaggggacaggaaggtggtctctcactcgaagttgggtcatctccctcagtgtggctggatctggggtttttatgggcacaggatcgggggggcccatgggccacaggtagtattggaaaaggcaacatttgattggttaaaaagcattattcagaaagaaccagttgggaaagagcaggcaaacagaaatagaagttctctctctgggtcatgggtttcaggctgtttttgacttgaaggtggggtttcaccctgtctgactaggatttttctgcttcctgcctctatcagtgttgattgacttaatatttagtgagcttccatttgagcctaaagatgttatattaaatctaatgatttttatttgcatctagattattgcttatcatgtgtcagtacttctttcctgagtccatacttctttcattttttttctttttttgagatgaggccccactctgtaacccaggctggagagcagtggtgcgatcacggttcactgcaacccctcgagcctgggcacctgctcgcctcagcctctggagtagctggtactataggcacacaccaccacgcctagctaatatttctattttttgtagagatggggtttcaccatgttgcccaggctggtctcgaactcttggactcaagcaatccacttgccttggcctcccaaagtgctgggatttacaggcatgagctactgcacctggcctctattcatttttatatacagtgttgtgagtactaattttcaaatatttgttaacctgaaacccttcaaaagggttgaaaagttatctaaaagtacagttatctactacagatataggtggagaagcttatggtggaagaatgctagcagctacagccttgtgaacatctcttcattttatcatctatcgtgtgaaagagatcttctatcgtttgaaagggatctttaatctttcctgtgtttgggtatcttcgaagggctaggccatacatagaacagggtaggagaaaggaggtaagtaaggtgaaaggagaaacagatttgtttgacacaagtgttgtagggactgatactttgttaccctcagttgtgtaacatgttgcttgattctgttgaagaccctgtattccgggtgttcattgattttttttgggatacttccttgacgatctgtatgaagcaccctaagagaacatgttagaacatgtagtttctctaaaaattccactttgaatttttggaagactgctatgtattagtcaaaaaatattttagataaatttctttcccctgccctcttattctttgactaattagtcaaatgtatacaaagggtgtcttcctgtatttgaaccaaccaaaaacacacatctgaactgtcagctaaggggtaggcttggtgttatgatcaattagaggagtcttgcttctagaacaatacccactagaacaataaaaaatccaagtctttttttagaactgttgatatgatttaaaagataagattaatgggccgggcgcagtggctcacgcctgtaatcccagcactttgggaggccgaggtgggtggatcatgatgtcaggagttcgagaccagcctgatcaatatgatgaaaccacatctctagtaagaatacaaaaattagccaggtgtggtggtgcgtgcctgtaatcccagctactcaggaggctgaggcaggagaattgcttggagccaggagacggaggttgcagtgagctgagattacaccattgcactccaacctgggcaacagagcgagagcaagactccatctc

SEQ ID NO: 59319 - DNA, 469 bp, Homo Sapiens
tttttttttcattttaagagcagaaaatttgccctggtttctgtgacccaaattctctttcctacttatgaggtaaagcattcttgcgtgcatgctgactgtcctcaaatattaggcttgaggctctgtggccaatgggaggttagatttcaatgaaaagggaacagatgtagatttgggttaagtttcttcaggatcctgtgctggaaaagccccttaacacattactgtcatcatagtaacagccaattccatctgcatagtaatccttgctttattcttcttgtctgagccaagttacattgtgactcactcgtctaccctctaaatcattattccctttgctgaaaaaaaggcagtcaactactgtggcaacaaggtagttagtgaactggcaaacaggcctgctgtgctggtatttaaatgactgaagaatgtttagttttacctccaagatattttactattg

SEQ ID NO: 59320 - DNA, 3653 bp, Homo Sapiens
gtctgagtgctgggcgcgttttagcgatggcttctgctctcaacagcaaaattaacccgcccggcacttgccagggctccaaagccgacggtggcgccggctggagaatggactgtgatccccagatgcacgtgaaaatgtgcaagaagatcgcccagctcaccaaggtgatttatgccctgaacacccgccaggatgaggctgaggccagcatggaggcgctgcgggaagcgcaccaggaggagctccagaatgcggtggcagagaccaaggccaggctcctgcaggaacagggctgcgcagaggaggaagcccttctacagcgcatccaggccctggagagcgccctggagctgcagaagaggctgacggaggaggcgctggctgagtcggcctcgtgcaggctggagacgaaggagagagagctgagggtggaggcagagcacgccgagcgagtcctcacgctctccagggaaatgctggagctcaaggctgactacgagaggaggctccagcacctgacgagccacgaggctaccccgcagggccggctgccccaggagagccctgaaaccaagtcggagccaggccagggcccggagatgcaggaggtcctgctagaggtgcagcggctgcgagtggagaaccagcagctgagcaaggactacgcccgcaaggccgaggagctgcaggccacctacgagagggaaaacgaggccatccggcaggccatgcagcagtcggtgagccaggccctgtggcagtggcaggagaaggagtcggacctccgcaagaacttccaggtccaggagtcagccctgcaggctcaggtccggaagctggaaggagacctggagcacagaggccgcaagataagtgacctgaagaagtacgcccagaagctgaaggagaggattcagcacctggatgtgcagcttaaggaggctcgacaggagaattcagagttgaaaggcactgcaaaaaaacttggggagaagctggctgttgccaaagacagaatgatgctgcaggagtgtcgtgggacacagcagacagatgccatgaagactgagttagtttcagagaacaaagtcctgcgggaagagaatgacttggaagccggcaatcttcatcctcagcaggatcaaagctgtctcaaggagtgcccttgcatgaaaggaggcacagatatgcagaccaagaaagaggcaagtgctgagacagaatatatgaagcaacaatatgaagaagaccttcgtaaaatcaaacatcagacagaagaggagaagaaacatctcaaagaccagctagtgaagcgactagaagacttggtaaagaagcacaccgtggaaatcaaatccgttcgctcgtccgtggaggctgaaagaaagaaactgcagagggaagtagaagcacagttggaggaagtgaggaagaaatcagaaaaggagataaagcagctggaagaagagaaagcagccctcaatgtgaagctccagaattctctgcttgaggttttaaggctggaagaatttatccaacaaaataagacacgccccacaggagctgaggaaagtccccaggaattaggccgccagcactgcagcattctggagacccaggatccatgcttgaagctggatgaaacttcgccgagaggagaggagtatcaagataagttagcagctgaagaaggaaccagcagtgatgaagaagaaaggaccaaagtgcttctcaaggagggaagtgacccacaacctccactgggctctttgttgaaggagaaaacatccaaaatccagcgtctagaggaggactggcaaagccagaaggccaaattgcaagcccaggtctcacagatgcagcaggctctggagcagtgcaccagcaactacagggaggacctgcaggcactcaagcagctctcggacctggagagggagaagctgcagcatgagctccaggagaccactcagcagaaccacgccatgaaagcccagctcgaggcttcccaccagagagccctgcgcatgctggagaaggccagacatcaggaactcaaggccacagaggaacgcttgaagaaggaatccagccacagcctccagatccaacaccagacacaccgactggagctccaggccttggaggaaaaggccaggcaagagctgcaggaggagcgtgagaggatgcaggcacagcaggccctgctgctagagtcgctcagacaggagctgtcggagcagcaagctgcctgttctgggcaccagaaggacttggaggcactgcaggccgagctgagggctctgggcagacagcaagccagcagccagtgtccaggagacagcaaggatcacataatcgccacagaggagtggggcggcccgggccaggccggctccccaccgggcgctgctgggcagggttccggcgagggatgcgggctctgggaggagaacgcgcagctccaggacgcggtgcggcggctgcgcgcggaggtggagcagcatcagcaggaggcgcagaagctccgagaccagcgcaggttcctggaggagactcagcaagcccagcgggccagggaggtggagacactgcgccaggaacaccggaaggagatgcaggccatggtggcagatttcagtagtgcccaggcccagctccaggcccggctggctgccctggaagccgaactgaaagattccggagagaagccagggaagggagcgtccaggcccgaggaccttcagctcattggccgcctgcagacccgcctgaaggagagagaggacatcatcaagcagctcacggaagagagaagatttcactacgcagcattccccagtgccatgtcccaccggaatcggtctttctctttcaatcctcacccgggatatttgaccccttccatgaagaaaaagaaggtggaggacgtgcccagccgcgtggtcagcgtgccgaacctcgcctcctatgcaaagaactttctgagtggcgatctgagttccaggattaatgcccctccaataactacatcacccagcttggacccaagccccagctgtggccggacctacaaacccaaccagtctacagatgcaaaaactgccacaaggaccccagatggtgaaacggcccaagccaaagaagcccagcagaaacagggctctccgcaccaggaatggttcaccaagtacttttctttctaagctaacctttgggatacatcacagaggatacttgaaaaacatttattttaaatcatccgattgaaggaatgaactaacaccaaccaaccaaataatatgcttatgatttatatatgatagctaaaacaaattttggcgttaacacttcatactgttctgccaggcacagcagctcacgcctgtaatcccatcactttgggaggctgaggcagatggactgcttgagtccaggaatttgagaccagcctggccaatatggtgaaaccccatctctacaaaatatacaaaaattagccaggcatggtggcgtgtgcctgtggtcccaggtacttgggggactgaggcgggaggatcacttgaacctaggaggcagaggttgcagtgagccaagttcgaactcctgcattccaaccagcctgggtgacagagggagaccctgtctcc

SEQ ID NO: 59321 - DNA, 563 bp, Homo Sapiens
  misc_feature (524)..(524): n is a, c, g, or t
  misc_feature (544)..(544): n is a, c, g, or t
gcactatatagatcagagtttttacggcaatttttccaaaaggccagaggagtttttaaattctggtattataatttttttggtctcttccaatttaaataatctgtttctaggcaaaacagtgtgatgaagagtaaaatgtccctgaatgaagaccaccatgtggcccctctgctgtccttatacctcggcagtctgcgatctccaatcataagccaacagcatgatgcctggggctgcggtgcccacagcacgcgggctagaagaagctctcagctttgatttagtgctccctgaaccaaccaaccttctttcaagctgcttttcatgagaaagttcagtccagagcatcagccacagctgctccttctagcccatattgttcaccaggaaaagaaaacctatttagagccaaagaacacacaggtgaagcagaacaccaaattgcttttggcaggaaacaccactggagaagtcaagaaatctaaattatgttgaggccctgaagacaaggacactggagncttacagacggaggacctgnacttaggaaagcacctgtg

SEQ ID NO: 59322 - DNA, 2129 bp, Homo Sapiens
aaacaaagcaacttctgctttttcactgttggccacaaacttaaatttctattgtaaatatcctcataagccaagttaaccaatgaaatgccaattcctatggtttagtcatgttacctgtgtttagaatttaggtttcaccaaccaagatatataagacagggctacagaatataactcatataagacaggggctggagaccgtaactccagcagtaaaacagtcactgaactgaaaatgcttatgcagactaggggagttcttagccccatggagaagcttctgtcagagggaaagcaggattcttttggaggcagtaatgaacaaaggtgtctgcagcctgtgctctgagcacccctttctatggcaggagagtttcctgcagggagccatgcagtgtggatatgaagggattctattcattgagtgtgagggaaaccagatgcttgggttccaacattctagatatttcctaaagcttgtatttcttttccctccactagatcttcctggttcataaatctaccaagatgcagaagaaagtcctctccctccgcctgccctgtgaatttggggccccactcaaggaatttgccataaaggaaagcacatacagtaagtggtcattggatgctcaggtcctgactgacagggccacggggctctgcagggagtggaaatggaaggagctctggttatgagatgggcagatatgggcctgagtcttggtactgaatgactaggcagataacctactccaggagcctcagttttctcatctgtgtaatgggatgatggtaacctctgagatgttaatgagtcaaacaacctgaatataaagtgtgcagcctactgcatggcatatggtagggaactaatagaggttgacttcctctccccctacccagttaagtggaacatgaattcagttcccaggtttgccagtgactaagttgcaaggagactgtagcgagagagccctttcacgctaatcctaaatcctaaagcatgtgtctgcacttcttcgtgaataaataatccctgagcagacctgttccctccaggcaatcagtgttcagtcttctatgaaatgcagctaatcagaggcagaatccaaccttttgatgaacattttgaagggagagtggtgttcagaagtgttggttttctttctgctgttccacgattggtcattggaaatgtgaagtgtcgggaggccaaattttaaataaaaaagggaacacccagttctgatgtactgccagcctccaagaaaggatcggaagatggatctgcacatcaaagggggaggagtgggaggagcaggccaggaggagagagctcagaagcaagacagagcctgggattcccacttgcttcccgatttcccagcacctcacctcctgcatttggagaagctgaaggtgtacatgaaggtcaatttcacggccgagatgagattctactcagccgggagggcacaatcttgctgagccaaatgaccattaactgagttaggggagggtaaaacctgccaggctgactgtgaaccgcctccagctcaattgtcaacctggatcttacaagtccacaaggtcatggatgccagggaaaaacttccccctgaaaggcgcacaagcaggcggaacccagccaataatgtaaatacattaggatgcaaccagaaggtacattgcaaacccactgcttgaaaggtaataaattcatattgagctaataatgtgttaggtgaattgataatgaatttatattaagtgaatcaattaagtaattctgaattggcttttgaaagtctgcgagaggctgggcaccatggctcacacctgtaatcctagcactttgggaggccaaggccagagggttgcttgagctcaggaatttgagaccagcctgggcaacatggcaaaactccatctccaccaaaaaaaaaaaaaaaaattagccaggcatgatgacacacgcctgtagtcccagctactaaggaggctgaggtgggatcacttaagtgcagtgagccgtgatcgtgccactgcactccagcctgggcgacagagccagaccgtgtcttaaaaatgaaaaaacaacccaaaaaatattaaaaaaaaaa

SEQ ID NO: 59323 - DNA, 1227 bp, Homo Sapiens
gtatatgttaaaaaaagagaaggtcgcattatggacagacttcgtgaatgggaatttgcttagaattgtgagtagttctgaattagaaaagtatgtgaaggaaaggcagctgtaaacgtattgtgccctggagagttgtacacatgttgaaatgtaatctgggcttacctgatccatttggagtggatgtcactgccgagtctgttctcacatggaaccatgtgtgtggggttgccagcctcacagatacaatcaatcctattcccctctgacataaggaactcctctggagtggcagagtcttatcacagaaggcagccaccatttcaccaaaacaaaagttcacggcattcaattcctttttcctttagctatttatatatgcagtactctcagtcatatgcagaaatactttttttttttaattaatagttacaggcttgttggtccagtgggatttgggtagggggagaaagataccttctaaaatggatcaatagaaccaaaataatacagcatgttctataaccacaaggaaatcaaatgatcctgtcatgattccagttagtcataactatgttagcagtgctaaatgcattttagaaatggtgacttctgtggttttcttagcatttgtctctaacaaatggtgaaataattactcatggccctctctgccattgtctttcattttttcacagtgaaattagacccctttacttcaccattctgccactgcaaattaagtataaagaaaatagcaagagtgtccacaccagtagacagtaagcttctctacctgtaagtgatgaaatcatagctaatgcacttgccatggagttttcaagatgattggtgtcagacagttttcactttgtttaaaaagtgttggtggccttttgtggtggtgttacaatcctctgggggcttaggaggatgttgatgcaacttttagaagcttttaatttcaaaaacaactcaaaaatctgaaggacagtcatagctgccactcagccccagttagtcaaaccccagtgacctttgcccctggttgccaagggctttgcaacatcaagcagggaaataaggatctgtctgtttagtggataccgtgtatcctttaatagaccaggtaacagttcgtgttagtttagactattgttttgtactgtactttcttgggtggcagaggaaagaaaagtaaaacattaaaaaaaaaaaaaaaaa

SEQ ID NO: 59324 - DNA, 1753 bp, Homo Sapiens
ttcaaagaaagatgtcaccacaaaattaaaagctatgcaggaatttggaaccatgtgtacagagagagacacagaaactgtgaaaggagttcttccatattggccaagaattttttgcaaaatttcacttgatcatgaccgtcgcgtccgagaagccacacaacaagcttttgaaaaacttatccttaaagtaaagaaacagttggctccctacttaaaaagtttaatgggagattggctaatggctcagtgtgatacttacacaccagctgcgtttgcagcaaaagatgcatttgaagcggcttttcctccaagcaagcaacctgaagccatagcattttgtaaggatgaaattacaagtgtgctgcaggatcatcttataaaagaaacacctgatacactcagtgacccgcaaactgttccagaggaagaaagagaagctaaattctaccgggttgtaacttgttccttattggcattaaagagattactttgccttttacctgataatgagcttgattctctggaggagaaatttaagtctcttttatcacagaataagttttggaagtatggaaaacacagtgtacctcagattcgctcagcttattttgagttagtctctgcattgtgccagcgcattccacagttgatgaaagaggaagcatccaaagtgagcccatcagttctacttagcattgatgacagtgacccaattgtctgcccagctctctgggaagctgtactctatacacttacaactattgaggactgttggcttcatgtaaatgcaaaaaagagtgtgtttcccaagctgtcaactgtgattcgtgaaggtggtcggggtctagctactgtcatatatccttaccttctgccattcatcagcaagctccctcattccatcacaaatccaaagttggatttcttcaaaaatttcctcacgtctctagttgctgggctgtcaacagagagaactaaaaccagctcttcagagtcctcggcagtaatatctgctttttttgaatgcttacgttttataatgcagcaaaacttaggtgaggaagagattgaacagatgctcgtcaatgatcagtaatcaacacagaagacttctgtgaccaaatatgtggagatttctcccacccagcaagcagtcagttctgcagcagataccagctatgtgtcctccaattcaattctgactatctacctggagatagtgtcagatctcactggcttaggactcagtcccacaagaccgctccccacttctgatgccaatcgcaagccccaggctgttttacctgggcttctgaccaaccagctgtacatctaaatcagggatcccatgaccccctcctggggtttgcttaatttgctagactgtctcacagaactcagagaaacaatttaccagtttactataaatgatattacaaaggatacaaatgaagacatgcacacgttgatcccttttattgatgcagttctcaaagacccaggattgcaacatgggcagctatttaaccatttagcagaaactctaagttcctgggaagccaaagcagacacggaaaaagatgaaaaaacagctcacaacttggagaacgtactgatacatttctgagaaagactgtcagagatctgtgttgcgaaaatcagtgagccggaagctgatgttgagtccgttttgggtgtatctaacctattacaggtgcttcagaagccgaagagctcattgaagtcaagt

SEQ ID NO: 59325 - DNA, 558 bp, Homo Sapiens
  misc_feature (485)..(485): n is a, c, g, or t
  misc_feature (528)..(528): n is a, c, g, or t
  misc_feature (533)..(533): n is a, c, g, or t
  misc_feature (558)..(558): n is a, c, g, or t
ctgctcggtgccattttatttaatgcaaacactagacagtttacaagtcacacctggacacaagcacgtgaacagatgtacagggaattctggaattttgagatcagtccccatttcttcctcagggccctgggactgaacacggtctcacagacagcacatattctacgtcacagctctagggtttcaaggacttagccatccgacaggcctcaccataaaggtaaagtggacaacccctgaggtcacgctgtccaggtggcgacaggccacgcatgccaaaatcctccatagccacctccggcccagcaccagccagagggtggggccatcggttctcgacatacttggtataagggagggacaagcctgacaaagttcacaatctggccaatgagtgtgggaggccctggaaacaggccaatcctgcaagccaccccacccttactaacttcctgaacatgggaagctttttgagaccaggnccaaggttcttttcctttattgggaccacgcaaaaggcatttntgcantgcttgaaggtccccctttaaaccn

SEQ ID NO: 59326 - DNA, 1716 bp, Homo Sapiens
ttcctatattttatcaatgaatatttattgagcacctcttttattctagccattttgctaggtatcccaaggaaagcctactgtgttctgaaaaattggaattcattaattaaattaaacaggactaacatactatacttttccatccagagaaatgcaaaattataccttgattcaagacaaaatagtttgtccctcccagccatagagaaagctgagttgtttgttacttttagatcttaggtacagaatctgataaagtctaggtggttctgtataccagcccttgaatttataatcgtagagacttgccttaaatatatgatcagtttaggtaagttcgagaaattctgaagtgtcaattatgttgtattagtccgttttcatgctgctgataaagacatacccaagactgggtaatttataaagaaaaagaggtttaatggactcacagttccacgtgactggggaggcctcacaatcatggcagaaggtgaaaggcctgtcttacatggctgcaggcaagggagaatgagagagccaagtgtaaggggaaactccttataaaaccatcagatctcatgagacttattcactaccatgagaacagtatgggagggaaccccccgcccccatgattcaattatctcccaccaggtccctcccacaacccgtgggaattataggagtttcaatcaagatgagatttgggtggggatagagccaaaccacaccatatataaaaatagtatagataatagttatatggagtactacccactgaagggatacatgtttacctgttcccccaagttaggtagccagaagtgttgtgtttgcattgttggcacaacctgtcaacattaataataactaatttattaagtacttctgtgtgccagggattgttcctaagcttcctacaagaataaatttatttaatcttcctaagaatcctgtgaagtgggtacagttgagcatcccaaatcccaaatgctccagaatccaaaactttttgagcactgacatgatgctcaaaggaaatgctcactgaagcattttggatttttggattggggatgctcaaccgtaagtataattaatgcagatattctaaaatctgaaaaatcctgatatctgaaacacttctggtcccaatcattttggataagggatactcaacctgtactacttactctctccatttcacagatgaagaaagtgaggtagggaaaaagataagtaacttgcccaaggttacagagctggtaagtggcagagccccaggcagccttgctgtatagcttactgtctcctaaccattattctatgctacctttcatgggccctcatgttaagagtaactcttcagtttagcaaattattctgcattatatgatgagcttacatataatagcaataatagaccagaagcggtggctcacacatgtaatcccaacactttgggagaccagggtgggcagattgcttgagttcatgtgttcaagaccagcctggacaacttagcaaaactccatctctacaaaaaatacaaaaaaaaaaaaaattagccaggtatggtggtacatgcctgtagtcccggctactcgtgaggctgaggtgggaggattgcttgagcccaggagttggaggttgcagtgagccaagatcgtgacactgcactccagcctgggcaatagaaccagacattgtctc

SEQ ID NO: 59327 - DNA, 14131 bp, Homo Sapiens; identical to SEQ ID NO: 32059

SEQ ID NO: 59328 - DNA, 2350 bp, Homo Sapiens
gtagatgtgagagtagtatctccaaataacttaacaactgtgtctctaaactgtattgtctacattttaactgtaaaagtgttcatgatacatgctttgtacatatgaacttttttccacagtagaaataatttggcttataattttgccttccccccaccttgaaatatacaatacaaagtaattcatgaaacaactttctcgttgaaattttgtaacttgtgtttaaacgataccatttcctatccacaagtgatcactggaaagttgtttgagccgtcgcgccatggcagagtagaaaggatggcccaagatattctctcatgtccagctggttgcctttttgaggtctcttgttgcatcaagtgctacaaggaggattacccagccactggcgaggaccaatacctaatccccaggtcgagtgcagagccttgcgtcatgtgccatgtgccgtagtggcctcagagaaggctgtgcgggcgggctcctggggatgcagtcaccttgcagacatgtggacaacaggcaagatgaggatactggagacagtcaaaacacacaaggaaggctcagcaatcaagagaagttataaccctgcatatgcaccacacaaaggcaacttgatgattggagatgtcagaagtagacatggggaatgaagtagaaaatattagcaggtaaaggagacagaagaaagcaaatagaatgtagagcccacagctggactagcatcagccatgttttggagctacaaagtcactccagcagaagttccacatgaggaagtgatatttcctgatccttccaagacatttccctgtagacttaagtggatcataactcccagtattcctcattttactgagtgctgattttcctatttattataacactattatgacagggatatgcatacatgatatactgaatatgctgtgttgatgggcagtacactcaataattaaagagtgttaacgaaattaattttttaaatattaaaaagtattttctgtctttttaaaataccatctatacctttaaacagtttataaagcacatgtgaagcagccaccatgttgcgttagacgtgtaatttacagaggtaacaagcagagaagagtccttagcattgtgaaatggctgggtttcacagacagctctgcccgctatgggaacactaagccaagcataaattctcatggcgtgggagttagtggaagaatccgatggctctgaaagtcagtagagtttgaatttggtgttaaaggaaatagaacattgaaggctttgagtggaagaatctttaagatggggtaatctggctgcggtgagcagagtggattgggttgggagacaagccagggaactggtgtagtaatccagatggtggtcgggtctagagctcaactagagtagtggtcgatggggttttgaaaatggaaagctacaccaggtttgggagcctgaatatatcgcgtaatggagaaggctgaagggcctgttcactagtagtgtctgtgaccaggtgccttagagagcaggatagccagtaagaagtcactggagctcaggggcgagttagcaccaagactcgaacctcctttttagacccagtgctgggaagcagagccaagtgctgtcttggtggctggaccccattgctagagcgcatcctcacagccagtgaggacaaaatcagagggaaaatgcctgtgctgagccaaggcagagacaactggcgagctcgctcagcatgctcttttgaaggcaagaaggaagatgtctcgggcaccatcttaccctgagtggacctgtttcctttcttgtggcatactgttagctttgatttctctggaagcttttgctttttctgaacctccacgtcccttgctctggtggctgattggactcttcccccacacagggtcatcctcatccttgaacaccacgctgccttcaactagtgcctggtcatccattcgtgcctccaactacaacgttcccctcagcagtacagcacaaagcacttcaggtgggcctcgccttcgctcaggaagggagggttggtcacagccagagccgcggctgttgttttaatgccctcttctttcgtccagtcttctcagggaattaggagattctgtttgtgagcctgggaaattatttttaacatcccttactcctttttaaacttactgtacccagcagtcatctactaaaatcagttttcactgaacagctctcatctcatctcagagccacagcagctctgtaattaaatgtaatttaatccaaactagttctcagactatctgcagcggaggatctttaaaaaaaaaaaaaaaaa

SEQ ID NO: 59329 - DNA, 2088 bp, Homo Sapiens
cctctgggctgccatttgcagggaatttcatgtacatattcagacatgcagacttgcacaactgcttattatagaaatattctttgttactaagtgtctaacagacttaaacatacagggtttccgtatatggagaaaagtgattccacccactccatgccctggcacgtcatgatgccagcccttagatttatttggcttccagaatttaaatagacagtgatgtaaatcagaagttagtgtttcacctactggcactaagtaactaaatcatcacattggtgatgaggaaggtaaatccttttcagtttggctacagaatggaaataacatttattacaatatgatctaagttatattgacaacagaatgatttatttctatgttataaaagatgaagaaggagaggagaatacagagaagttaaatggtttggcagtgatcacacaacaagccgaaagtagaatccaagtctctctggagtcccttctctgatcaaagtttcatcttattgaatgtcacagcattataaagtgagataaatgtatctcaccacacatgtgcttagtgaattattctcagtagatagcttcttctatttttaaacattttgttctgagattttaaaatttcaattctattctcttatgttttaaaaccgtgttcacagatttgagctaaaatgggaatcgaagagtgactttggcatttttccatgactattcttgtattgatcttaaactggcatcacacgtgttccaggagggcacttgttttgcacaacagttttacaaactagctgtctataagaggcagttcattaaaatttaatgtttttaaatgatctttagatgtatagaattttttaaagactacatattagagaaagcatgcatacaaaatatttttttttttgcccagtagtggtgataatagctaacatttattgaactcttactctgtaatagccactgttccagtgattaactctttattttaattttttttaattttatttttattatatattgacaaattacagttacatatttatggggtgcaaagtggtgttaagattttttaatacaatgtggaaagattaagttaagctagttagcatatccatcacctcgatatttaacattttttgtgacgagaacattagagatttactgttagtgatattgaaatgtatataacaattatattcaccatgctgtgcaattgatctaaaaaaggatcaaacttattcttcctgcctaactggggctttgtaccctttgactgtaatctccttttccccgctacccccttggccgctggtaaccaccattctactgtctacttctatgagtttagtcgtttttcaatgcaatctctataaaaattccaatgccatttctcatacatatagaaaaataatcctaaaatttatataaaaccacagagaaacccaagtagccaaggcaattgtaagcaaaaaagaacaaagctggagcattacactactagatttcaaactactgtattctataaaatgatagtaattagaacacattgtacagtataaaaaaagacacattgaccagtggaacagggtagagagcccagaagagaacccatgcaactgtggtcaattgatcttcaacaaatgtatcaagaatatacagtaggaaaggacagtgtcttcaataaatggtgtttggaaaattggatatccatatgcaaaagagggaaatcgaacccttacctcacaccacctacaaaatcaaatcaaattggattaacatcttcagcataagacctgaaactgttaaactactggaagaaaacataggagaaaagctaaatgacattgtgtctggacaatgatatttatagttattaaatatttttatttaaatcctcaaaacaactctatgagatattattattcccattttatggataaggaaactgatgtacagagtgattaaatgacttgctagaggctaggtgcagtggcccatgcctgtaatcccagcactctgggtggaaggatcgcttgaggccaggagttcaagaccagcttaggcaagactctgtctc

SEQ ID NO: 59330 - DNA, 2898 bp, Homo Sapiens
gtgctgacaagagagactacaaaagctacaaggtcagcctatctcggcagacttgttgccaagcacttacattgaagggttgccccaaggccctacaacggcagaagagactgttcagaaagaggggatgcgaaaacaaggcttatttcaatggctcgattctcttcagattgataacctcacctctccagacctgcggctcaccgtgggagcagtgattgtggaggaaatgagagcagccatagagagggagactggttttcagtgttcagctggaatttcacacaataaggtcctggcaaaactggcctgtggactaaacaagcccaaccgccaaaccctggtttcacatgggtcagtcccacagctcttcagccaaatgcccattcgcaaaatccgtagtcttggaggaaagctaggggcctctgtcattgagatcctagggatagaatacatgggtgaactgacccagttcactgaatcccagctccagagtcattttggggagaagaatgggtcttggctatatgccatgtgccgagggattgaacatgatccagttaaacccaggcaactacccaagaccattggctgtagtaagaacttcccaggaaaaacagctcttgctactcgggaacaggtacaatggtggctgttgcaattagcccaggaactagaggagagactgactaaagaccgaaatgataatgacagggtagccacccagctggttgtgagcattcgtgtacaaggagacaaacgcctcagcagcctgcgccgctgctgtgcccttacccgctatgatgctcacaagatgggccatgatgcatttactgtcatcaagaactgtaatacttctggaatccagacagaatggtctcctcctctcacaatgcttttcctctgtgctacaaaattttctgcctctgccccttcatcttctacagacatcaccagcttcttgagcagtgacccaagttctctgccaaaggtgccagttaccagctcagaagctaagacccagggaagtggcccagcggtgacagccactaagaaagcaaccacgtctctggaatcattcttccaaaaagctgcagaaaggcagaaagttaaagaagcttcgctttcatctcttactgctcccactcaggctcccatgagcaattcaccatccaagccctcattaccttttcaaaccagtcaaagtacaggaactgagcccttctttaagcagaaaagtctgcttctaaagcagaaacagcttaataattcttcagtttcttccccccaacaaaacccatggtccaactgtaaagcattaccaaactctttaccaacagagtatccagggtgtgtccctgtttgtgaaggggtgtcgaagctagaagaatcctctaaagcaactcctgcagagatggatttggcccacaacagccaaagcatgcacgcctcttcagcttccaaatctgtgctggaggtgactcagaaagcaaccccaaatccaagtcttctagctgctgaggaccaagtgccctgtgagaagtgtggctccctggtaccggtatgggatatgccagaacacatggactatcattttgcattggagttgcagaaatcctttttgcagccccactcttcaaacccccaggttgtttctgccgtatctcatcaaggcaaaagaaatcccaagagccctttggcctgcactaataaacgccccaggcctgagggcatgcaaacattggaatcattttttaagccattaacacattagtgctgccctcaggcttgcctgtaggatttaatattttttatctttacagatctttatctttaatattttatctttacagatttccctgagaaagggaattatgaaatttttaatacaaaaaataatccatttaggtgctgagttacggtcccatctcttcacaggcatggattctaatcccactgctgacagagatgtaaaaattcatcctaccagagtttttaatctttagcatttagggaggcagtgtcataaagtaaaaagtgtgtgggccttggagtctaagagacgtggttgcaaacttagctctggttattgcaatgagggccttgaacaagtcattttcttcacattctcatctgtaaaatggagataataccttacagattattgcagattaataacaatgtattcaaattatgtaactcgacctcccaaagttgctgggattacagatgttagccaccgatcctggccccccccccaaaagtttctgatataaagctggcaggaagtcagtgacaattattaagtcttggaagaaaaatttctaagtttctcctgagaagaaatttctgaagaaacatcttgtagataatgtagtttcacagtaaagtttttttatttttatttttttaatttgaggcagagccttgttctgtcacccaggctggagtgcagtggtgtgatctcagctcactgcagcctccgcctcccaggttcaagtgattctcatgcctcagcctcccaagtagctgggattacgggcatgtgccaccacacttggctaattttttttttttttttttggagacagagtcttgctctatcaccaatgcactccagccagggtgagagtgagagactgtctcaaaaaaaaaaaaaaaacaaaagaaaaacttctctctagctctgtgacgggcagttcagataataccttcaccagatttacctgttttcagctgaagaatgtgagatgaagccttgaaaccctaaaagtgatatggtaactagggcaggtctttctgtacataaaagtgacttaataaacagtgaatttcatacaggtaaaccctattataccctcagttctaaaaaaaaaaaaaaaaaaaaaaaaaaaaaaa

SEQ ID NO: 59331 - DNA, 549 bp, Homo Sapiens
tttttttttttgcgtgtggttttgatggtggttgtagttttgtttcgttttgtttttaagagatgagtcttgaaggcagagttgtaatggccctcctctctcccctcccattcccgaaattagggtagcttaacagaaagccaccttgaccacatggccagggactgagattcaatggggaaagaaagactgtagctggaatgtgaagaatttgatttgcagttgattgcaggttgggtttccggaagggcagacagctcaatgtagtgccatcatagggcctcagatgcccacactccacccccagagcttcacaaaatggaaggaccctggagtcacccttctcccccacccccataagcactcagcctacagattatttcaagtgatcaggagaattaaaacacaccccaaccctgagttgctctttagcaagtctatttacaatttttttctcacctctccctggaggtaaatctgggtttcaagttgggaagccatggggtgagggagttccccagtgcaatggccgatgacgagtatccttgc

SEQ ID NO: 59332 - DNA, 3215 bp, Homo Sapiens
ttgtatatttggattgctgctctaggttgaccctcagctaaagaaaaatgcttccttatttagttttattctgcctgcctgttagtttgaaaggtaccacttgtttgcttcatgcagttttttttttttttttggttaaactcagcctctatatgtgtttatatgctttcatattttcttcaagtcacttctggattggtaattcacgtaccagagtggccgatgccatatttcttgtttattcttttttttcaatttcatggccttccagcagttttctgggaatactttctgccagttcttgtttacttctctgtttatatgcgtcggtattggaatgctagaacgttaaagtacaaaatatagaaaatataaaatttctgttcatacttttacatcttaaactggaaagacatatctcacattttttaaccatttatgtgttaggtgatatgctaagttcattattcatgttacttaatcatttacaacaactctttggcgtatagatgccattttactggtgaggaaactaaggcttacaaggcgatgtagttcttttttaagggtcatacacttagtgaaagtgaggctggaattttaaccctgacagggtgaccctagagtgcagttacccgggtatactctctgaggagtcctgtatgaatcacgtcctgggaatttttccaaagtgaaatgaatgcttctggaagaactcagcacaattggcttgaattcctgtggaaattttgggcaaatattggaaccagctggaaatatagtaatggggtatcacatgccaaatctggacctgaccattttagcctgatagtcgacgggtattagtaagatgtgtcttcaaacccttatttattctcattggttacaataggtactatgcaggatgcactgtggaaagtaagactggatatgagattgataatgctcagtaaattgtgatgatatgtaattaacaaatgtaagagatatgattttcagtattgtagcattgtgtccaagtggcaatttttttttttttttagatggagtcttgcactccagcctggcaacagagcaagaccccgtctcaaaaaaaaaaaaaaaaaaaaaaaagtccgagtgtcttcctacctccaaatgacagcattagtgtcttagcaatggtttttaaccaagctaaaatggctggaatgccagatgtagaattcacaatatggataggaatgaagaacattgagattcagggaaaagccataacccaatccaaagaatctaaggaatacaataaaatgatacaagaactgaaagaagaaatggccattttaataaggaaccaaactgatatgataatgctgaaaaacttactgcaataatttcacaatagaattgcaagtattaacaggcaaagtgaacaagcttaggaatggatctcagagctggaagactagttctctgaattaactcaatccaataaaaataaagaaaaaaatgaagaaaacccaggagaaatatgggatcaagtaatgagaaaaaatttatgacccattgacattcctgaaagagagggagagaaagcaagcaacttggaaaacatatgtgaggatgttgtccatgaaaatttcccaaacctcactagagaagccaacattaaaattcaggtaaggcagagagcccttgtgacatactatacaagatgacatccccaagacacataatcttcagatttcccaaggtcaaaataaaagaaaaaaacgttaatggcaaccagaaggaaggggcagatcacctacaaaggtaaccccatcaggctaactgcagacttttcagcagaaactctctgagccagaagagagaaataatagtgggaggctttgccattccactgaccttattaaacagatcactgatacagaaaactaatcaaaatattcaggacctgaactagacacttgaccaaatggacctaacagatatctatagaactctccactaaaaaacaagagtatacgttcttctcatctgtacatggcatgtactctaaaatcggccgtaaaacaattctcagtaaataaaaaaaatactgacatcataccaagtgcactattagatcacacagcaaaataaaaatagaaatcaacactaagttcgctgaagaccatacaattacatggaaattttacaatgtgctcctgaatgacttctggataaacaataaaattaggccagaaaacaagaaattcttcgaaactaatgaaaacaaagacacaacatagccgaatgtctgtgacacagccaaagcagtgttgaaaggaatgttcatagcacaaaatgcccacttcaaaaagttagaaagaattcaaatgaacaacctaacatcaaacacagagaaactagaaaaacatgagaaaatgaaccccaaagctattaaaggacaagaagtaaccaaaatcagaactaactgactgcaattgagatgtgaaaaaccatacaaaaaatcaatgagtctagaagttggttttttgaaagtataaataagattgatagactgctatctagataattaaaaagagaagttccaaataaacacaatcagaaatgacaaatgcttctagacttgataaacaacttcagcaaagtttcaggatacaaaatcgacataaaaaaatcactagcatccctgtataaaaagaacatacaagctgagagccaaataaggaacaccatcccattcacaatatgtacaaaaaaaaataaaatacctagaaatacagctaaccagggaggtgaaagctctctataatgaggattacaaaacactgctgaaagagatcagagattatacaaacaaatgaaaaagtattatgcagccataaaaatgatgagtttatgtcctttgtagggacatggatgaagctggaaaccatcattctcagcaaactatcacaagaacagaaaaccaaacactgcatgttctcactcataggtgggaattgaacaatgagaacacatggacacaggaaggggaacatcacacaccggggcctgttgtggggttggggtcgggggagggatagcattaggagatatacctaatgttaaatgacaagttaatgggtgcagcacaccaacatggcagatgtatacatatgtaacaaacctgcacgctgtgcacatgtaccctaaaacttagagtacaataaaaaaaaagacaaaag

SEQ ID NO: 59333 - DNA, 1711 bp, Homo Sapiens
tttttttttttaaatctaagctattcccatctcccccattctatgctggggtgatataccacaagaagttacaggaacaactgctaaaagaattaaacatcttgggcctttacacagctgttgctatatcatggctttggtgcatggtcggtcacagatgctgtcaagaggcttatgtttagttatccttttgcttccccaacccccacattaaaggtctccttcaccttctctgtcctttttgctacctcccttcttcctgctccaagctcccacaaaccagccttaataaaagaggaaggatcaaggcaacactccacatcagtcatatttcagggcagcttgatgtttgtttgctaatagatggttggtattatctaaccaatagggtgactccaagttttaaaaaacagcaagactaattcagaaataatattatttcttaatttttttaaaaatagagatggggtctcactttgttgcctaggctggtcttgaatgcctaggctcaagcaatcctcccaccttgtcctcccaaagtgctaggattacaggcgtgagccattgcacccgggctctcagaaatcttaaaaaggatttagtttcatttaaaaataacaaacacagttccccaaatctgaaatttagttattgaaactggaccatgttgtccatggaaaacatatcttactttataccagattttaaaattaacactggtgtaagtgcagcctaaaattcctctgagccccacttttacataagaaaaattattgaatatgataaaggtagcatttccaatcagtgagaaaagataggttattcaatttgtgttgggactggtggatatatatctaggaaaaaaaagtacagactctaaatattgaaaggtaaaactgaaaacataaaaatatttgaagaaatcactggaaaattattctacaaactgcatggggaatgacagtctgtgataatagtaaccaagaaccatgaaagaatagattggtaacaattcagctacataaaaatccctaaatttctctatggcagaaaccatgaaacagataaatttaccaaactggaaaaaattttcacaaatcatgtcacaaagagctaattttcttaaaatatataaaaaagatctttcaaagtgtcatacacaaaacactgcttttcgaaaaacataagctcctacaaagcagtaagaaaatgatgaacaaatagaaaaatgggcaaaggtgatgatttaacagttcacagagaaatacaaatggcttctaaaatatataaaaagatgcccaacttcgttcataatatgaaaaatgtaaattaagactacactaagatacaatttttcacagatctgttttctaaaaataaaataagcttgagagagagcctcttatctgaattctgggacagcctgatttgcatgagggaaataggcatcctcctgcactgctggtgggagggtaaaggtacagtctcagtggaggacagtttgctgttacctctcagaattacaaatgcatgtgtttgttttgatgtagcaatttcccatctaggaatttattcttgaaagacagtcatacaagattttcacaccagcattatttgtaatagcaaaaagatgggaaattacctaaatgctcatatataggggactgctaaattgtggaattccatgcaattctaaaaaaaaaaaaaaaaa

SEQ ID NO: 59334 - DNA, 1366 bp, Homo Sapiens
ggtgtatttcagcagtataccacagctatttaatgtgtatttcagcagtataccacagctatttaatgtgtatttcagcagtataccacagctatttaatgtgtatttcagcagtataccacagctatttaatgtgtatttcagcagtatgccacagctatttaatgtgtatttcagcagtatgccacagctatttaatgtgtatttcagcagtatgccacagctatttaatgtgtatttcagcagtatgccacagctatttaatgtgtatttcagcagtatgccacagctatttaatgtgtatttcagcagtatgccacagctatttaatgtgtatttcagcagtatgccacagctatttaatatgtatttcaaaatgcaggcagtccttgctttgcatggtaatgtggagccataaaaatgaccatgctgctgagactctgcaaagcaatgttaatcatcagtgaagggaaattattattctgtgacctttacatttttttgtgaaaatattaaaaactgcaatagtcaactataaaggtacaaattaggaaaaagtgaaaaatatattaaagttaatattgttaatacatggtaatttaaaacggaaacattgataatgttttacttatttgcaaaaaaaaaaaatgtatcaaagagaagaacaatccaaacctaaagcaaacagaagggtggaaataataaagattagagcagaaattaatgaaataggtaatagaaaagatgtaagaagacagacaaaactgaaagttggtcctttgaaaaaaaaatcaacaaaatgacaaaccttcagaccagccaagaaaaaagagagaaggctgaaatttctgaaagcaagcatgaaagagggaaacaagagactattatgagtaactatgtgctaatacctgaggtaacttagatgaaattgacagattgctagaaagacataaactaccacttctaatcagtgttatagttgagattctatccagggcaataagaaaagaaaaagaaaaagaaaatcagattagaaaggaagaaataggccgggcgcggtggctcacgcctgtaatcccagcactttgggaggccgaggcgggcggaacacgaggtcaggagatcgagaccatcccggctaaaacggtgaaaccccgtctctactaaaaatacaaaaaattagccgggcgtagtggcgggcgcctgtagtcccagctacttgggaggctgaggcaggagaatggcgtgaacccgggaggcggagcttgcagtgagctgagatcccgccactgcactccagcctgggcgacagagcgagactccgtctcaaaaaaaaaaaaaaaaaaaaaaaaaaaaaaaaaaaaaa

SEQ ID NO: 59335 - DNA, 3207 bp, Homo Sapiens
aaagctagttgagagagcatactctggtttttcatctctcacagtagtcaaagaagttacatatacaattagaatttgttgtttctgttgccagaaactcaatacaatttgtcacatcaggaaaggttttttgttgttattgttgttgtttttgagacggaatttcacttcactcttgttgcccaggctggagtgcaatggcgcgatctcggctcaccacaacccccacctcccaggttcaagcgattctcctgcctcagcctcccaagtagctggaattacaggctttgtcactacgcctggctaattttgtatttttagtagagatggggtttctccatgttggtcctgctggtgtcgaactcccaacctcaggtgatccgcctgcctcagcctcccaaagtgctgcgattacaggcgtgagccactgcacctggcccaggaaaagttttttacatacgaattaaagatgcttctttatgcaaatttttaaaccccaggtttgaagtaggataaaaggtaacattaaatctgagatcatttctagctctggaattctgtgattgtaatgagttttgatttctaaatgttttttcctttcataatttcagggttagtcagcaacataaaatcaacctaatgacagcagacaacttatccatctgtttttggccaaccttgatgagacctgattttgaaaatcgagagtttctgtctactactaagattcatcaatctgttgttgaaacattcattcagcagtgtcagtttttcttttacaatggagaaattgtagaaacgacaaacattgtggctcctccaccaccttcaaacccaggacagttggtggaaccaatggtgccacttcagttgccgccaccattgcaacctcagctgatacaaccacagttacaaacggatcctcttggtattatatgagtaggaagtgattgcaaacaggctggatttggacaaaaagcaaatctagacatgcatgtttcagggttcagtagtatacttcatgtttcatacagataattcacattcaaaattacattttctctttgaactagatggtattccttattcacttacattacaaatctaagaccatgtgataagcatgactggagaggtttaatttttataaacaaaaatagctataaagtacaaagctgctgctgcatgcaaccttattgcaatcagtatatcattcctgtggcaatttctgtcaccttatattgtgaataaaatttttctatagaaattaaatgatttaaaaactcacctatatgaaacatttaatgcttttcagcctgctttctggctgattttgttatttgatgtgctaatttgggcaacttaatttacattctggcagtcggtgtagataactaaaagcccagttaagtattttataatttcaggctactgaggccatgcttgggatgttgtttgaaagaaagaaaaaatacacttgacatatttcacatttctgtaccttcatctttacttccaagtaaacccgtggatgatttgatgagggataaatgaacctatttcttttacacacataccaaggacatgcttgtggctaaagtgagttgataatgttgtgcaaaggatagttgtcaccaactcatttctttatggtccataatgaaataaaaattttgtatactgttaattctgtaaacagatgcatgttcaaaagatctatgatggtcttgtaatcttaatctaatatattttagatattttaattttttccctcttggggaacacatttagtatagtgtagaaaatacttccatgacattttcatataaggttatataacttttcatacataaacatgaaatttgttgtagaaaattctttaaaccaaacatttaaatctaggacttcaatttaatttgttccttgaatctatttttatgtggcccttaaaaaatatccaaaaaacccattgctaatatagcaataagaatactttgggtactgacagactctttggagtgtttatattacaaatttgtattcatattcttttctgtgatgtgttgtactaaaatccaaaatggcttttgcaccatttttaagccaattttttcctttgatgttggtaccagaattactataagtgactgctgcttttgggggtaaacattttgttagtgaagataaaaccagaacactaaattatggataaaattttcagaataggtggcacaggtaaatttcactaggttatattttgtgtagtaaagaaaaaaattatttggtcaatgttatcttaattcatactacaatttaagattatcttatgtgtattatagtaaatagatgattttcagattcaaggctcctaagagtttgatttgctctgttttttcctaaaataaatattgtctctcccaactgttaagttctaggtattgtacttccaattttaacttcagaaccaagatgttggcatgaaccaggctgctgttgaagtacatgtatattataaattatcttatttgtgttatactcttacatgttatcttttctaagaaaacaaagtccctattattcctattgcaaagcacacaggaattaagaaagtacagtaatttttaaaaaaaaatccggtaaatgtagtattcttaacctgttctatattacttatacctattgtctatatagctttaatttatagttgtcagtttaactattggcatgtctggcaaagaaaattaaactttaagagttttataaactgtttctaggttgctaaagaatttatttttctactatatatggtatagacaaagcatcaaactatgtacaggaaaaaagcctgactatttctatttggaagtaggctgaaaagagaattttcaaaactgttcgtgtcttcagttcattctgtcataactttgctattgtaatatgtgaataccagtttatttaagctgttctcttttatactgtattaatttaatgttcatctgcgtttagtaccatttttgttattaaaactggcatttaccgtttttcacattaacccaccttgcaccttcccccaaacttatctccacttttctatgcattctatcattgatttgacacacttcatagtgagtcatttaaatactctacgtttggttcaattaaccagtaggttacagttattgaaaattaaagtacagtttaaagctc

SEQ ID NO: 59336 - DNA, 2160 bp, Homo Sapiens
aagcaaaaagttctttatagagttggaagcaagacatcagaataatatcttcatagatgacataagtgacattgtggaaaaacacacagcatccacatttgacccatatgtgaaatactgcacaaatgaagtctaccaacaacgaacactacaaaaattgttagctaccaatccatcctttaaggaagtattgtcaaggattgagtcccatgaagactgtaggaacttacccatgatctcttttctcattctccccatgcagagggtgacccgccttcccctgctgatggatactatctgtcaaaaaacacctaaggactctccgaagtatgaagtctgcaaaagagccttgaaggaagttagcaagttggttcgactatgcaatgagggcgcccggaagatggaaaggactgagatgatgtacacaattaactcccagctggaatttaaaattaagccttttcctttagtctcctcttcccggtggttggtaaaaagaggtgaattgacagcctatgttgaagacactgtgcttttctcaagaaggacatccaaacagcaagtctacttctttctctttaacgatgtgctcattatcaccaagaagaagagtgaagaaagttacaacgtcaatgattattccttaagagatcagctattggtggaatcttgtgacaatgaagagcttaattcttctccagggaagaacagctccacaatgctctattcaagacagagctctgccagtcacctctttactctgacagtccttagtaaccacgcgaatgagaaagtggagatgctactaggagctgagacgcagagcgagcgagcccgctggataactgccctgggacacagcagcgggaagccgcctgcagaccgaacctcactgacccaggtggaaatcgttaggtcatttactgctaagcagccagatgaactctccctgcaggtggctgacgtcgtcctcatctatcaacgtgtcagcgatggctggtatgagggggaacgactacgagatggagaaagaggctggtttcctatggaatgtgccaaggagataacatgtcaagctacaattgataagaatgtggagagaatgggacgcttgctaggactggagaccaacgtgtagtctctcagatggtcttttgttactgcaagatttgcacgacacttaccgggctggttggttctgggctagttttattgttaattttgtcacagcctatttaattaaaagaacgaaaacacttgcctttaagcttgccaggttgttctgctctctcatgagaagagcttggatacagtgagtttgcacagctcagtttttacctaaccacacacttgcagacctcctgaggtacacagaatagctgagcagttcacttcagggatcaggtcatctctgctcctcctagtttcaccatgttctggcaataaaaaacacatattatatcctggttttctctatccttgcattactaaggtgactgtctctctttatacatccttgtatggttctcccagtattagcaagattgtatatctgtaaagaatgtccagttttgtaaatatttccctgcctttttttttctttttttacatctgattttaatgcttcgttaacttcaaaaggaactggtagagttcagaaggtgagctattgtttttctaaacctcttcccaggaaggggacattgacacttgaatttttgtcacctttttcctcattagaaggaaagtagaaagccttactgtaggatttttaaaaaaaaatccatctcaccccatattggtcttaaataagtatagactaattaacctaagctacctttaacaacgtagaatttagatgggttcatatatgtgagaaaaacctgaatataggacaggggtcctacttttttccccacctctgtcgcccaggctagagtatagtggtgtgatcttggcccactgcaacctctgcttcctaggttcaagtgattctcctactttttgtatttttagtagagacagggtttcatcatgttggccaggatggtctcttaactcctgccctcaagtgatccaccagagaggagatcctcggcctccccaagtgctgggattataggcatgagccaccgtgcccagcctactttctaattaatt

SEQ ID NO: 59337 - DNA, 1842 bp, Homo Sapiens
agaaaataaatatatcttacccttcaactaatatgtttctgaatcttagaaaattactatgatattagtattcaatttcttatattctctgtctccctcttctctcatttcctttccccttttcttcccctctgttccttcccccaatcattctcttctctattctatgtctctgaagctatcctggccttttagtcgtacctcaagctgtacaggacagtagtttaccaagagtagctcgctgctatcgacacaatcgcctgcctgttgtatgttggaagaactcaagaagtggtactctgctcctccgatctggaggaaccataagtggcagctcttcccgttcaagacccgagtattttagaattactgcctccaacaggatgtattcactctgccggaggtaagtgtgtcagtgggctccaaaaagaggtcttccttcctttcttcttatttgaatctttaataggccatttgcatccatagccctgagatagataaaaatgcctgaaaataagaacaaggtctccaggatacgagcaagcatctcattggcattctcggaacaattaccttactgaaagtacctctagtaggtgagaaggtgaaaggtaaagtactcaccccctatgaatttctcttgtctttctcttcccagtttgcttcttttctagcatgactaaagataacttgaagaacaggattttcccagcccaatagaggacatgaaagtcttttgtaggctggggagccacaaactctttctataaagggtcagttggtaaatattttcagtttatgagccatagagtctcttgttgcagctattcaactgtgccgcaaaagcagccacagacagtaaggaaatgagtaggcatggccagttttggcccacaggctataatttgctgacccaggtgtaggcaaggctttcttatgcggtctaattggaatgttttcaagggaatattacttaaaggatgtaaataaagaggcattttcttttttcagttcttgtcatctctcactgtttttcaaatatgttgagtcttattccatgctttactatatgtaaatatatattttctaaaattacattttcaccatccacaagtttagtcattttcatctccaggtaagatttttctttgcatttataaattcctgcttaaacagctctgaaatcactttgtaaattgtaagctttgtacatattttagaaagttatcttaatgttactttcaaccctgttgctcttgaagatagatatgtcattttaaatggcaatttaagtttacaaatattaatatgaaacttcagaaacaagttgggaatatagttttgagattgtggccaaataaacattttgcatgaagttctgaaaaattggcactctgagtatgcagtaatttttctggaattctccgtcattctaactaaattttctctgaagatgagtcatgttgtcggggtgtgatgtcctgctgtttggaaagtttgctatcaaaattatgccagccattgagaaaacagactcatttatcattccaatctgtcagaagtaaaataaaattttaatagatgacttattagaacactggttataaagcatttatgatggtaaaaagtaatatatatccattaagttattagcaggaaggaaatggaataataaaaaataatccaaaagaaggcaagaaaggaaaaaaaaggggacatagaacaaatggaataaataacaagtagtaagatggtagatttaaattcaaatatatccataattgcattaattattaattgactaaatgttccaattcaaagaaagagatcagggtttgcttt

SEQ ID NO: 59338 - DNA, 550 bp, Homo Sapiens
  misc_feature (293)..(293): n is a, c, g, or t
  misc_feature (501)..(501): n is a, c, g, or t
tgtgtttttttttgtttgtttgtttgtttttcctcttcatcttgctatagagttcctctactagtaaatattgcaatagccaggcctcatgaactggggggctgtcccatttgcaggggtctcacgtcacttcagtagggggcaaatcggctgtagccacctcggtataaactcgccacagcgccaactccatagctagcggcaggggcaagggcatggtaggggtcggctgtgtacaccctgccataaccgtcactgtaagcggctgcagcggctgcagcagcggttggctnggttgcagtagcaggctgtgcatatctgtaggctgcatatccaccctgaggtattttagcgctaatgattggttcctgtaagactattcctggataggcggggatggctgttggaggtacgctcggactgcaccatatactgtccgcctctgccctcaaatgggtcctctgaaacggctccgtggttgctgcagtaaggtaagggaancaggaatgattaaaggatgtaatgttgatacccccttcctgatagggcc

SEQ ID NO: 59339 - DNA, 1847 bp, Homo Sapiens
aggggataggacgaagaaaccgaagggaaagctcagttgcagcggcgactttcagtttcatttccacggaccctcctgcctgggccgcagccgccgccgcgatgcccagtaagttcagctgccggcagctccgggaggcgggccagtgtttcgagagtttcctggtcgttcggggactggacatggagacagatcgcgagcggctgcggaccatttataaccgcgacttcaagatcagctttgggacccccgcccctggcttctcctccatgctgtatggaatgaagattgcaaatctggcctacgtcaccaagactcgggtcaggttcttcagactcgaccgctgggccgacgtgcggttcccagaaaagaggagaatgaagctggggtcagatatcagcaaacaccacaagtcactgctagccaagatcttttatgacagggctgagtatcttcatgggaaacatggtgtggatgtggaagtccaggggccccatgaagcccgagatgggcagctccttatccgcctggatttgaaccgcaaagaggtgctgaccctgaggcttcggaatggcggaacccagtctgttaccctcactcacctcttcccactctgccggacaccccagtttgctttctacaatgaagaccaggagttgccctgtccactgggccccggtgaatgctatgaactccatgtccattgtaagaccagctttgtgggctacttcccagccacagtgctctgggagctgctgggacctggggagtcgggttcagaaggagccggcacattctacattgcccgcttcttggctgccgtcgcccacagccccctggctgcacagctgaagcccatgactcccttcaagcggacccggatcaccggaaaccctgtggtgaccaatcggatagaggaaggagagagacctgaccgcgctaagggctatgacctggagttaagtatggcgctggggacatactacccacctccccgcctcaggcagctgctccccatgcttcttcagggaacaagtatcttcactgcccctaaggagatcgcagagatcaaggcccagctggagacagccctgaagtggaggaactatgaggtgaagctgcggctgctgctgcacctggaggaactgcagatggagcatgatatccggcactatgacctggagtcggtgcccatgacctgggaccctgtggaccagaaccccaggctgctcacgctggaggttcctggagtgactgagagccgcccctcagtgctacggggcgaccacctgtttgcccttttgtcctcggagacacaccaggaggaccccatcacatataagggctttgtgcacaaggtggaattggaccgtgtcaagctgagcttttccatgagcctcctgagccgctttgtggatgggttgaccttcaaggtgaactttaccttcaaccgccagccgctgcgagtccagcaccgtgccctggagctgacagggcgctggctgctgtggcccatgctctttcctgtggcacctcgggacgtcccgctgctgccctcagatgtgaaactcaagctgtacgaccggagtctggagtcaaacccagagcagctgcaggccatgaggcacattgttacgggcaccacccgtccagccttaactgcctgcctgaccctgaaccagaacccagctgaactgcccctccaagggacaggaaggctgggggagggagtttacaacccaagccattccaccccctcccctgctggggagaatgacacatcaagctgctaacaattgggggaaggggaaggaagaaaactctgaaaacaaaatcttgttctatgc

SEQ ID NO: 59340 - DNA, 2290 bp, Homo Sapiens
gcggctgaagggccttttttttttttttttttggtagagagacacaagattattctaaaatgtatatggaaagcaattccaaaaaagaagagtagaggaattgccctccctgatgttgagaaccgtacagctacagcacagcgttatacggctcctggcagacaaccagtcctgctgcagcgaggtggggacaaggccgggagcagctcacttcccagtagaggccatccgatggcgccagggcacggggcagctgccgtcctcatggcccggggtaacgtgggcacagggtttcctcatcccactgtgctctgtgtctcccctgagcccggtgattttacgcacctgacttcgttagtcttctcggcaatgcccagcgtgcagaccaggctcgagaggtgtgtcggtgtgcccagggtcacgcagcttcctggtggccaagccgaggttagaagctagttctggtgggtgcgaaagcccccgatgtcggcagctctgccaccaggcccgcacaagcaggtggtgtaagaggggaggcgttggggccggcagtgctcaagtcaggattgagccgtctatctggaaggtctgttgagggtgtgtgctggtggccgggaggtggtggcaggctgactacctgccattttcctgcagtgcctaggcccaggagagggagcagcccccggtcaggacccagctgcaggacaccccatcctcatggaccttggttcccgctctccgtccccccacaaatgggctcccagcataacttcccccgagggctcctttcctctccccacacagagccctgttccggagcggcgcttgcagcacaccaatgacaggaggattgggcttcagggaagcaggcgcctggagctgtgtccagttaggtgcgtggcgcttgcagatccaagcatggaatattcatgcctcccccggcccagcagctgcggcttctcatctggaacaagggggtgcttctcccaggaaggccagtgggagcaggggtgtgtctgagaatgcctgggcgctctgccctcacgatggccgctgatgccacaggcccggcctctgtgcccaggccactctccagcctggtgaggtctgttctgggaaaagagagaagcaagacagatgtgggccttgccctgtggggccagggcacaggcaggaatcccacttggggttaagacgctgcagtcacccctccaggtgccggggtcccctgtggccgtggcgttctaggagagatgggcagggagacgctggcgccctgtcgtgtagcttatccttgtatctgcttcacaggctcttccactgtgcaatttcctaaaattttggcgaggcccatttatccattttaattttattctgtggattgtgctttggtgttgagtgtcagagctctgcctcatccagatcctgaagatttcttttttaacataattctgtgttttacatgtaagttcgtgatacagtttgagttaaattttatttgagatgtgaggtttcggtcaaaaaaaatttttttttaactaagtgtgtccagctcctccggctccagctgtagcaaagacaaggctgcccttcctccactgaagcgcctttgtgacttttctgtgacttttccgtatcgattaatagggtcatatgttgtttattctttagcctgttgatatagcagattacattgattgattttcaaataccaagctagcctcgtacacctaaacgaagtcccacttggtcacggcataatattctctgttagaaagtggcctggacgcgtctgtgggtctctttcgagttcctctgttctgttctgctggtctccacatctcccctccagcgctgccccagccatgtctgtctgacgtaggagccgtataacgctgtgctgtagctgtacggttctcaacatcaggaagggcaattcctctactcttcttttttggaattgctttccatatacattttagaataatcttgtgtctctctaccaaaaaaaaaaaaaaaaatgctggccgggcatggtggctcacgcctgtaatcccaacacttggggaagccaaggcaaaaggatcgcttgagcccaggagttgggagaccagcctgggcaacacagggagaccccatctctatgaaaaaaatacagccatgagtggtggtgcgcacctgtagttacagctacttggcacgttgaggcaggaagattgcctgaggctgcagtgagccaagaccacaccactgcactccagcctgggtgacagaataagaccctctttcc

SEQ ID NO: 59341 - DNA, 1655 bp, Homo Sapiens
ttttttgtggatttggttgtagttgttaaaagttctctacgttttggatggattgccttaattgtatttatacaaatgagtttggtttatattacgctacttatttagaaggacactctgctcacaaattatactagtttggtagtttcataaactagcttgaatcaaaataaaatggtgctaaaatggatgttattttcaactgtgcactcagtaattgcaaatagttgtactatatacctgggggtgaacacaaaggaagtagttgcatcatctctgtataaaacacagatttatctttcgtgtagttgtgcattacgtagaatatggtaaggcaacatctgagttgtagaagtgctactggagtaacagaggtgaggaatcggttctgctcaagggagaggactggagaagagacctagaggggagagtggaccttgaagaactgattggatttctcctgttggggaatgtgaatcataaagctgaggtagggggaacaagtatgaggctggcaagtagtcggtttggcaggagcacagagtgcctgcagggagggccatgggagatcaagctgggaatgtagaaaggaattttaacttgataaattttgactaggtaacaggttcttttatcaaggagtgacattttatgtcacaaaaatttttaaaccatttctgtctcttggaaaacccaaaggtagcagtggcatgtgaaaaattcttgttttaaaagattcaaacaataaagaaacatgtagaatattttgtgtccgtacattctatgtttaggagttgaatattaatttgtaattaatagaatggagaaaagcaatcagttaattagaattcactttataggaatgaaatctaggcttaaagtgtgagaataatctgtcttgctttgttgaaagtgaccttggtattcgaagacagagctgctcactactgtcagtaagacgtatatcttaaattgattaaggctaggtaatcagtttgtgaggattcattcttaacgcttgtgccattggcaggcatattttaggtgctgtctcttgggccataaattagtgacactgagtgctgtggatttacccaaataacctctttaatatttgctactgttaggtgtaattagaagatacatgaaagaggcagggtgtggtggcttatgcttgtaatcctagcactttgggaggctgaggcaggtggatcaacatggcgaaatcccatctctaccaaaaatacaaaaaattagccaggcgtggtggcacccgctgcacctgtatcagctattcaggaggccaaggtgggaggatcacttgagccctggaggcagagattgcagtaagccaggatctcaggatcgtgccactgcactccagccttggagacagagagagactccatctcggggtggggggaaaaaaaaagagaaaaagtgagagagcctggacaacataacaagagcctgtctctacaaaaataaaattaaaaaaaaattagccaggtgtgatgccacatgcctgtagtcctagctacttgcaagcctaaggtgggaggatccattgagcccaggagttcaaggctgcagtgagctgtgatgttgccgctacactccaggtgacagagcaagaccctaagaccttatctctt

SEQ ID NO: 59342 - DNA, 349 bp, Homo Sapiens
ttttttttttttcatttttgattagttgattttataagataaaagtaattttaataaagaaaaaattcaacattgaaggctcagacgttcttgggggtactgggaagggaaatttcccacttcttcctcccacctccctggcatcagtgtcggggggtggcggcaagtttttctcatcttggaaggaatgaggggcagggagactttcctctgtctgaatgtctctctcctctggggctgcctggctgccagttggtctgtctctgtgtgcctcttgtctatcttcggcacccttgcccgagtccctggggttgggagatggtgtccaatccctgggtctccatcaact

SEQ ID NO: 59343 - DNA, 2344 bp, Homo Sapiens
gcgagcggctgactgcccgtagaggaaacgacattcggagctgcgctcccgcccaggccggccctgacgcgggcctcgtcagccagtaacagggagcagaggtgggagttagcgaggcgaccacgaaaacggtgaaagtcggaaccgacagcctcctccgagaagggcaggagctgggaggaggcggcagcggcggcggcagaaacagcagcggcggcggcggcggcagctgggaggaggtggtgacggtggcaacggcagcgtcggggacgatggcgcgactcgtggcagtgtgcagggacggggaggaggagttccccttcgagaggaggcagattcccctctacatagacgacaccctgacgatggtgatggaatttcctgataatgtgttaaatctcgatggacatcagaataatggtgcacagctaaagcagttcattcagcgacatggtatgcttaagcaacaggatctaagtattgccatggtggtgacatcacgcgaagtcctgagtgcactttctcagcttgtcccatgtgttggttgtcgtcgcagtgtggagcgtctcttttcccagcttgtagagtctggaaatcctgctcttgaacccctaacagtagggcccaagggagtcctgtctgtaactagaagctgcatgactgatgcaaagaagctttatacattattttatgtacatgggtccaaactaaatgacatgatagatgctattccaaaaagtaagaagaataagagatgtcagttgcactccttagatacgcacaagccaaaacctttgggaggttgttggatggatgtatgggaactaatgtcgcaggaatgcagggatgaagtagttttaattgactcgagttgtcttttagaaacactagaaacatatctgcgaaaacacaggttttgcactgattgcaaaaataaagtcctccgagcatacaatatccttattggtgaacttgactgcagcaaagaaaagggctactgtgctgcactttatgaaggcttgcggtgctgtccacatgaacgacacatacatgtttgctgtgaaacagacttcattgcacatcttttgggtcgtgctgagccagagttcgcaggagggcgaagagaaaggcatgcaaagacaatagatatagctcaagaagaagttctgacctgcttgggaattcatctttatgaaagactgcatcgaatctggcagaagctacgggcagaagagcagacatggcagatgctcttctatcttggtgttgatgctttacgcaagagttttgagatgaccgtggaaaaagtacagggtattagcagattggaacaactttgtgaggaattttcagaagaggaacgagtaagagaactcaagcaagaaaagaaacgccaaaaacggaagaatagacgaaaaaataagtgtgtgtgatattcctactcccttacaaacagcagatgaaaaggaagtaagccaagagaaggaaacagacttcatagaaaatagcagctacaaagcctgtggcagcactgaagatggtaatacttgtgtagaagtaattgttaccaatgaaaatacatcatgtacctgtcctagcagtggcaatcttttggggtcccctaaaataaagaaaggtaagtaaataatttctttttaaaatgaactcttaactctattctttcttactgttaaatgtaagagcttttagagattctgtgagctagaattttaaaactgctttatagttccaagaatatcatataatttagtcagatacttaatatttcctttttctttatgttctttgacttatttttgacaaaaacgaaaaatggtaaattcctaatcatattttcattatttaatttactttctacttaaaaaaaaaatccttcattggaaatgttctacttttaataagccattaattatgagatttttctgtggtccccaaagagttcactctttgtcctaatatacttattggtatgttaatagtaactctcacttgatttattctcaggcttatctccacactgtaatggtagtgattgcggatattcatctagcatggaagggagtgaaacaggttctcgggagggttcggatgttgcctgcactgaaggcatttgtaatcatgatgaacacggtaggctcacattaagtttcccagttatttctactacatggctgacttaagaacataaataagaaggattattgatttctgcaggtgatgactcttgtgttcatcactgtgaagacaaagaggatgatggtgatagttgtgttgaatgttgggcaaattctgaagagaacgacacaaaaaaaaaaaaaaaaaa

SEQ ID NO: 59344 - DNA, 1880 bp, Homo Sapiens
gataactaaattgaaagtgctggcagtccatttggggattgattagaatctaggggagatgtagttgtcagtgttcattctgtatgtaactcctgtctttggtttcagatctggttaggttctgttgatccttggggaactttctcatttgtttttatttttgccttggatctatgaatacctgaatgtattgtctaaaatggaaaaatcttaatgtagccattctattactatcactgaccctaggcctgaaaaaagtcacacctagggttaagaaatttttattttattttattttatttacttatttagagacagtttccctcttttgcccaggctggagtgcagtggcatgatcccagttcactgtaacctctgcctcccaggctcaagtgattctttagcctcaagcctcctgagtagctgggattacaggcgcccaccaccatacccagctaatttttgtatttctagtggagacggggtttcgccatgttggccaggctggtctggaacccctggcctcaagtgatcaccttgcctgggcctcccagagtactgggattacaggcgtgagccaccacgcccagccaaggacatttttctagtagaatgcaacacatgtccaagttgtgcatgatccaaaaaaagtgactagcaaaaaaaagtaatgatgtcttcatgtccagatctagatatcttctacttcatgtaactaaagagtaagcacagtgtgaataaagcatcaaataagtacaattatcattttaaaataatgtcttattaatgtaattttaagagaaaaaaattaaacatataaccttaagtggacatagtacttccttaacacgttaatgctgcagggcacagtggctcatgcctgtaatcccatcactttgggaggaggccaaggcaggtggattgcttgagcccaggagtttgaaaccagcctgggcaacatggcaaaaccctgtctttacaggaaaaattttaaaattagccaggcgtggtggtgtgtgcacctgtagtccctgctactcgggaggctgaggcaggaggattgctttatcccgggaggcagaggttgcaatgaactgagatcacgccattgcacaccagcctgggcactgtctcaaaacaaaaaacaaaagttaatgctcacatagaaaggattctttttaacaactttgttgagatataattcacataaccccccaaaaaaagaaataaaaaataattcaaatactataaaattcactgatttaagatatataattcagtaagttcacagggttatgcagctatcctcacagtctaatttcagaacaatttttaacccagaaaggaatcctgtacccattaatagtcattccccatgaccccacccacctccccccttactctaggcaactgacccactttctgtttttataggttgtctgttctgggcattttctataaatggaatgaatcatataacgtgaagttttgtgatgagcttctttcacttaatgttttcaaggtttatccacgttaagtacttcatatatagcatgtattatggccaaataacattccattttatggatataccaccttcatcaactgatggacataggggttatttccactttttggctactatgaataatgctgctacatacattcatacatgagctttagagtggatatgtgttttcagctctctgggatataaaagagtagaattgttgggttaaaactccatgtttaacattttaagaccaggcacaatggctcacacctgtaatccccgcactttgggaggctgaagcaggaggatcacttgagcctaggagtttgagaccaacctgggcaatatggcaaaaccttgcctctac

SEQ ID NO: 59345 - DNA, 4091 bp, Homo Sapiens
ttttttttttttttttttttttaaatagactatttttctagaacagttttaggttcacagcaaaattgagagtaagatatagagatttcccatatatcccctatccccatacatgcatagcctcctccactatcaacatctcccacgagggtgggaaatttttacaactgatgaacctacattgacaaattatcttaacataaagtccacagtttacattagggttcatgcttagtgttgtacattctatgggtttggacaaacgtatgatgacatgataacatgtatcaacccttacagtatcacacagtgaattttcactgcaaaaatcccttatgctatgcctgtttatctctccctccaccaccaacccctggcaaccactgatctctttattgtctccatagttttaccttttttcatacagtatgtagccttttcagattggtttctttcaattaataatatgcatttaaggttctttcatggcttgatagctcattttgtttttggcatttgtttggatttgccagtttatccattcacccactgaacgacaccttacttgctttaaagttttgacagttgtgcataaagctgctgtaacattcatgtactgtaatgttttaatctttaataatattaattaaatttaacagataaaacttatttcagacctgcccttgttccaggtctgattgaagccagcttgctgaggcaccttcagtaggtcatagctcaactgctgctgtggacttcagggggactcaaaagcattaatcaaaatcttccctctctagagtattttacactttaaaaaaatttataccctatttgtcccccaaaacagataattgacttaagcaattaaaaaaaagaaaaccaaaaacttcccctttcaactgttcttcagctctctgggattgctcagacctaagctgcctttccattgcatcctgtggtcttttactgatttcattggaaggcaggccttttcctaatggtttactttgacacagcaagcttcctcctaagataaattcctctttttctggttgtatttaaaaatgaagtgtattaaattcttcattctgatagttttcctgagggtatgggactaatattttacgtggtggcatataaataaaacctttttacttttttattggagacaagagtcttgctctgttgcccaggctggagtgcaatggcgtgatcttggctcgctgcagcctctgtctcctgggttcaagaaatccttgtgcctcagcctgccaagcagctgggattatcggtatgcaccaccacacccagctaagttttgtatttttagtagagacagggttttaccatgttggtcaggctggtcttgaactcctggtctcaagtgatctgcctgtttcagcctcccaaaatgctgggattataggcatgagccactacacccgatctttcccaggcatttctcttttgttcatttttggtggttgtatgctagagatttagagggaagaatggtgagatagtgtagaaaattatacttgtgtctaaattaatttgtgcattacattacatatgcatttaacacagaaaataatgtaggaagatgagacagtccaaggaagaaagctaaaaaaaaagttacatctctttatgtaggtaataaacaactatgactattttattcttctagcttttctcctacacatatgctcatgtcaccaccaccaccaattatgacaaatcggaatcattccatattattttatattattgctggctgctaagaacaattaacacactaacattttagttaaatttgcatgtgatatttgaagatcatatatttgataaataacttgtatccagaatacatgtagaactcttataataaaagacttaatagcatcttacaataactcaacaataaagagacaactcagttgaaaagataggcaaaggattttgcagagaagatctacaaaaggccaataagcacaggaaaagaagaataacattactagccgtcaaggacatgcaagtcacaccaacaatgagataaccatttcacatgttctaggatggctatcaaaaagacagacaaggatgtggagaaatcggagccctcatacttgctggtgagaatgtaaaatggtacagctgctgtaagaaaacagcctggcagttccccaaaatattcaacatatagttaccatatgactcagcaaatatactcctaggtatatatacccatgagacatgaaaacacacttctaacacagaaacttgtacacagattatcattcataatgtctagaaagtagaatcaactcaaatgtctatcagctaatgaatggattaacaaatatgcctatacattagaatgttaattattcagcagtaaaaagcaatgaagtacagatacgtgctacaacataggtgaaccttgacgacatgctcagagaaagaagccagtcacaaagtactgcacattgtatgatttcatttatgtgaaatgcccagaataggcaaatccatagggacaggaagtagactaacggttgggggatgggaaggttaggggagtagaactcctaatggctgctacgtttctttgaggagtgatgaaaatcacttttgattgtgctgatggttgcacaactccttggatatactaaaaccattgacctacacacttaaatgggtgaattgtatggtatttaaattctatcttaataaagctctttaacaataatatatatttacaaataaaggctgagaatccctaaatctacattttccggttccagtttttaaaacttcaaacaaaatgttaatgtcagcagcactggattggctgtccagaggttctagccctaggacttttcattagccagttgtgtccctggaagcaagacactcatttgtgaaatgagaataatgtatataatttaatcccataatttttaaggtccttttcctgaattttaatatagggcaaaataatgtaacttttttttttttttgagatggagtctcactttgtcgcccaggctggaatacagtggcacaatcttggctcactgcaacctctacattccaggttcaagctagtctcctgcctcagcctcctgagtagctgggattacaggcacacgccaccacgtccagctaattttttgtatttttagtagagacggggtgtcgccatgttggtcaggctggtctcgaactgctgacctgatgatccgcctgccttggcctcccaaagtgctgggattacaggcgtgagccactgcacctagccccaaaataacgtaacttttaaaaaacttgatatttaagtcttaaaagttgtagacatttcggagatactgttacggtcagaggcttagaaatcattgccaggttactttggctgcttattagaatcaccatgggagcttttaaaacatacctgtgcccgggtcataccgccagagagcctgatttaactggtctccagtggtcttccagcatctcactgctctccttcccttgctctccttatcccttgtcttttgcttacatcatgattttaatgtgcaggcaaagttgagagccactggctttgctaatgagcaatgctgtattggcagcatcaaaagtcagtcattttgtttcactttttattacttgataccatatttatcaacttgtgggttggggatggagagggtatataaaacaacaggtagacatataatagaaaatgtctataaaacatttcacaatttaagttgtgcctgcttataacgatttcttacatcagttttagatataaattactggttatataggttcagctttcagcatgtcttaatttgccactggttttatgaattttcctagacttatcattgtaatagaacataatatttcttattattttataatatctatattactaaagtgttatcatttcatttccataggtcataggttttggatctgttaaaattgcagcattcatagctatggtaggaattctgtctattgtggctcaggtgagtatcattttatctatacttaaaaaaaaaaaaaaaaaaaaa

SEQ ID NO: 59346 - DNA, 459 bp, Homo Sapiens
  misc_feature (407)..(407): n is a, c, g, or t
aaagtgcttgttcaagccttttttgttttaattatcaggcatgtttgtattgatttaaatgtatgtgtggtaggtttttttttttttttaatctgctttgtagctcctcacatcttcgaaacctgccaaactctttcaaaagtattgcagttatttagctgcatccacttgtattttatgggttatgaacatgccttgtcatcagttcttttgaacatgatgtctatgggtttttctttagcctatttgctccattttttatgaaactatctggggacacttcagaaagcatgtcataattatttttcccaagccccaagtccattgttttatgaaattttgttattagtgcattgtcatcttgccttgcatgctgcaaatatcttctcacactaacactgcatcgntccaccatctttggggaatcttaatggacagaatatttaatgtggttaattt

SEQ ID NO: 59347 - DNA, 1831 bp, Homo Sapiens
ttacgggggcttgagctggctcagagggaggcagggagcttttggacaattttgagttgaggagtgatgtggtttgaatctgaattatattttataagggttaaccacagatccaaggactcagtaaaagggtgaaaggcttctcatgcagttagccttgctgccagttcccataaatcagactcctccccactccgtttctgaattttctataggatcctcggcctcagcagatataaacgcttaccattgttgtgttcatgtctctagcccctgcacactgcaggcccctctcagcttcacatacccctctccatgtatgagatctggtgctagcaatcagattcaacccgaaggaacaagtgcatgtgcctgctgctctcaggagaaaaggcagcctgttctgggaggagctccctcactggcccacccacttgtgttgaagcaaaaagcaagaatcaattacttaaaggcaaaggagtgatattgctaaagcatgtgagtaatcattgcttctgattattgaagaggtcagattatgaatgaaaggataaaatgttttaatagtagagcagtgtcctgactataggggcccgttcatggagctggtcatttcttgaaatgagaagaaaccaacctggaagatgtctttttcagtagagtatggaataatcttacctgctctggattgccatgagcaggtgagaatgaaggctctgatattgtgtggtggtgtcacaggatggtgggggcggggcagaagtctcctgttggtgttctgatgcctgttcagctttgtcctcaggaaggtttggtcatcttggttctgccatcctcttgccttcctacggcagcagctgttcatggcactgaagatgtcccttcactgtcccaaaactggcactagaagtggctgggcaggggggccagagtcataggaagggtcttggagtcatcagatctgggttccaggcatggtgtgccttttcttggcaggattgatcttaagcaagtcaatgaacctctgcatcagtttccttatgtgtgaagttagagtgcttggctgtgctacctgattcctgagattggtgaaagagggcttggtttaccaaggctctccatcaagtggttgacctctaggaccagggccctctcagaggtgcagcttccatgtcagttggtgttgtaaccatggaaaagtccctttccaatcaaacttttagcacccctttccccccatctctgctccctttgccacaggataccttgtaaagttcctgccccagtatagggatatttttactgtcttttttattttttgagacagggttgcccagggtggagtgcagtggcaggatcacagcttactgcagccttgacctcccaggctcaggtcccatctgagcctcccgagtagctggggctacaggtgtgtgccaccctgccagctaattttttatatttttttgtagagacaaaacttttatttttttttcccatgttgctcatgctggtctcaaactcctgggctcaagcaatccacccgcctctgtaatcccagcactttgggaggccaaggcgggcggattatgaggtcaggagattgagaccagcctggccaacatggtgaaaccctgtctctactaaaaaatacaaaaattagctgggcatggtggcacgtgcctgtaatcccagctacttgagaggctgaggcaggagaatctctagatcccgggagttggaggttgcagtgagccaagatggtgccactgcactccagcctgggtgacagagcaagactctgtctcaaaaaaaaaaaaaaaaaaaaaaa

SEQ ID NO: 59348 - DNA, 1633 bp, Homo Sapiens
ctcatgctgttgactaagaacattcaatcttcgtaaactggccattggtgttctgagaaattgaatcttacagagttctttaattttgaaagtttcttgttctcagataatagccttgtaaatgtctccaaatttcagagtcctattcatcttacctaaaatacactaagcctttgttctctttaagtagtacagatatcttagcagccggtaatggttaagggtgtgagtacaaggaacattctgttttggccctctctgttgtgcattgtagatgcctcatcacttcataaatatttattgagtgtttttcttgttaagcactagataaacctacaaaggtaaataagactagagttcctgacctgtcaaggatatcaccacctggtctaccatccatctgtagcaaagtgaccccagcgttcctatgcttacactctcctttttggcagcttggccatgttagttcatgtgtgttagctgttattttttatttttgcttttgccaaaaatctcagtaagctaaacattgggatcagataggtttcattcttagatttcttgatagatttctttggtttaagttatggtttgagtttgtttccctttttcgttagtaaggccacatttttgtgaacatttatttgaattaaatttctgttttctttgatttaagccattttcatgaattttctccagatgcgtgaattgacattagatatcacatttcttttttaatggccattatggtttaatatgttgctattaaaaggttgttttagctgtttttcaactcgtttcatgatctatgtgtaagttcccaaagggagagatcatattttatcttttcccgtaaacgccacagcatataatagagtgccctgtatatggcggttgtcagtaaatgtttgactggattctctgaatggagtaaaacggtttttaaattcttttcatagcaggatagcccaaatggctataaaagaggtcaaaaattctttgtataaatgtttttgacttttggctgaaactattaaattctttataaaataaatcatcgttaaaaagatacccacatttatgttataagccaaactctgttattctggtaactgaaagtttgtgagctttttagatggttaatgggaatgttcagatagatacgactttgtcatctattgtctctgcatttgttaaaatagtaatgctatcactttctttagcctctaagttagttgatatttatttacccttgttaccaatgttcttatgttaaaacattcattcattcaatattaacaccttattgtagctaggtattttaataagtaaattaacttcctgatgcaaggagttggtagcatagtacagtgtagtgtttcacaaatataacctgttgatcctataaggtcaaaactattttcatcatagtaagatgtggttttctgttatcattgttttagtgtttgtactgataatgtggaagcaaacaccaaaacaatgaaaacagaaaaccacatgatgggtaaaactgctgatgcctcagcatgaatcagtgctgtgacaccagtctgtactagtagtcattgtattcttcaccatcacaaacttagttgaaaaaaaaaaaaaaaaa

SEQ ID NO: 59349 - DNA, 440 bp, Homo Sapiens
  misc_feature (10)..(10): n is a, c, g, or t
  misc_feature (107)..(107): n is a, c, g, or t
  misc_feature (206)..(206): n is a, c, g, or t
  misc_feature (313)..(313): n is a, c, g, or t
  misc_feature (350)..(350): n is a, c, g, or t
  misc_feature (399)..(399): n is a, c, g, or t
  misc_feature (401)..(401): n is a, c, g, or t
  misc_feature (430)..(430): n is a, c, g, or t
  misc_feature (439)..(439): n is a, c, g, or t
aacaaatganctgactgttataaagtaaacatcaaggaatgtaaaagccaatgctccactctctcagctacacatggagtcagtgctgcctgcaaagaacagagcangcgctggcagactgaccttcacagaccatgctaaaaccctctgaggaagtgcctggtgaatgctctggttgatgagattcgagccattatgttaccgancagtgtgcttcttacctataattccactgtccttgctttccagggtggaactagggctgctaatggtctcacagggacttttgttggctgccgtcttgctgacacanctattcaaggttgaacaggggctatcggtgctagganatgcggtgctgcttgttagtgtggagcaaggactgatgccttgactcananctgtgcacatggtttcatttttgtcttcnatggttatnt

SEQ ID NO: 59350 - DNA, 502 bp, Homo Sapiens
tcagtttcaaaacaacctttattctgtttgaagatctaatacaatgcattaaagcaacttaaaacaagacatagctccattgaatctataacttgaacgaaatgtcaaggaggcacactacccccaccccccaccccagttgccttgtgaaggcaaagttacaactgaccgtgacatcctccctctcgtcaaaagaccaactttattttaacaatgtcatataaacagatttttaaaaacattgaacagattgtagctttaaaaaatacacaggtataaatgagtttttttttgttttgatttttttaaatacatatatatatgtgcatatatatacatatatgtatatacatatatatatacacatatatatatatatacacacacatatatatatatatatatatatatatatatacacacacacacacacacacacacacatatatatatatatatatatatatatagcagcatcctgggcagctaatgctatctcatg

SEQ ID NO: 59351 - DNA, 568 bp, Homo Sapiens
  misc_feature (363)..(363): n is a, c, g, or t
  misc_feature (472)..(472): n is a, c, g, or t
  misc_feature (486)..(486): n is a, c, g, or t
  misc_feature (490)..(490): n is a, c, g, or t
  misc_feature (532)..(532): n is a, c, g, or t
  misc_feature (552)..(552): n is a, c, g, or t
ggtatttgcagaatttagctgagactgttacaagcggtttatcaaaataaatgcttgattggctttagcagttttttcgtaattgaaaaaataaagaaaaaagagttttctaataaatggagggagagagaggttaaatactttaattactaacttgcaaaaagatttccatttgaatatggaaacaatgtaaaggggtccctaatttttgtgggactggaatcactccagaggatttaatgatactgctgggcaactgaaactgtgcaactgaataatgtgatttctaagcatatttccttaaaatttaagtgctagggaacatttaaaaatggttactttaaaaggaaggttgaacatgcnaatttgtaggggagaggaattaaaacagtgatttctttcaatgatacatttttcattttctattttaaaacgaaaaccatttacttttgagtcaacaggcatgtgacanaaagtgctacatanaaanaatttccccaccaaggactgcctggatgttacttgaaaaacnccaggttaattatttctccncctttaaaacatactt

SEQ ID NO: 59352 - DNA, 539 bp, Homo Sapiens
  misc_feature (518)..(518): n is a, c, g, or t
  misc_feature (537)..(537): n is a, c, g, or t
aagttttgcagagatagggtctcgctatgttgctcaggctgcttttgaactcctggccttgagcaatcctcctgagtcagcctcccaaagcagccacggtgcccagcctcaattaagttttcaacagtgaattggacttaaattgtcttctgtttacaatggctgaaatccatttaaattctcttggtggtcctttgttgattcctggagatttttgtactgtacttgcctcattcctacacatactttaattgaataaaatgggagaatgcattttcccaagtgcctaaagtgactgtggaaataaccagggagagttactattttcagtctacaacatatcatattcagatacatatcattgtggacataatgaatgggaattctatatacctataattagtcaacataattttcttttcctccttatataatgattttatctgagcaccaagggggtcctttacatcaaataaactttatgacaatccaccaggccaatttactacctcaattanggcatggtacataaaaggnga

SEQ ID NO: 59353 - DNA, 557 bp, Homo Sapiens
  misc_feature (447)..(447): n is a, c, g, or t
  misc_feature (474)..(474): n is a, c, g, or t
  misc_feature (493)..(493): n is a, c, g, or t
  misc_feature (501)..(501): n is a, c, g, or t
  misc_feature (541)..(541): n is a, c, g, or t
  misc_feature (549)..(549): n is a, c, g, or t
  misc_feature (554)..(554): n is a, c, g, or t
gtaaacacatagggtctccctatgtggccaagactagtctcaaactcctgggtgtaagcgatcctcctgtcttggcctcccaaaatgctatgattatggctgtgagacactgcacccggcaagggaaagtactttattattattttttccagtgggagggtttggtcaggcagggagcggctgagaaagtattttaaagcaatgtttgttcttagttgacttcagtgtcaacaaaaatctaaaaaaaaaaaaaggaaaaaaaagttttgacttaactggggcaaaatgagtaacactagccaaaaagtcaggatgcataacatctgtatatcatgtgaccctggcaagtcccagctcctcaaagccaaatttttttcatctttctcataaggtagaaatagtttggcaaacgcttactgaactaccaggaagagctccaggataganggagctttggcatatcactagatgctnaaattcggactgggtgctnaaatttgnggccaactttttttctttcctttttttttttttttttggnaaacaaanccctnttt

SEQ ID NO: 59354 - DNA, 544 bp, Homo Sapiens
  misc_feature (308)..(308): n is a, c, g, or t
  misc_feature (314)..(314): n is a, c, g, or t
  misc_feature (466)..(466): n is a, c, g, or t
  misc_feature (494)..(494): n is a, c, g, or t
  misc_feature (515)..(515): n is a, c, g, or t
  misc_feature (522)..(522): n is a, c, g, or t
  misc_feature (525)..(525): n is a, c, g, or t
  misc_feature (535)..(535): n is a, c, g, or t
  misc_feature (537)..(537): n is a, c, g, or t
gagccacctcgccaggctaccaagtctcattttcctggtgacctgttcaaaacagagtcaaaatggcaaatttaagacatcctcctttatacaggactctttcaacacagtatagctcttttttttttttttttttttgagacggagtcccactctgttgcccaggctggagtgcagtggtgcgatctctgctcactgcaacctccgcctcccgggttcatgccattctcctgcctcagcctcctgagtagctgggactacaggcgcccgccaccacacccggctaattttttgtatttttagtaganaatggntttcaccgtgttagccaggatggtctcaatctcctgacctcgtgatccgcccgcctcggcctaccaaagtgctaggattacaggcgtgagccaccgcacccggccagctcttcttaagagacccttggtggggtgtggtagctcacacctgnaatctctgcattttgggtgtcaaggcanaaggaacttccgacctcgggngaactgnccncttgggcttncnaagggtg

SEQ ID NO: 59355 - DNA, 563 bp, Homo Sapiens
  misc_feature (61)..(61): n is a, c, g, or t
  misc_feature (472)..(472): n is a, c, g, or t
  misc_feature (489)..(489): n is a, c, g, or t
  misc_feature (493)..(493): n is a, c, g, or t
  misc_feature (536)..(536): n is a, c, g, or t
  misc_feature (544)..(544): n is a, c, g, or t
  misc_feature (552)..(552): n is a, c, g, or t
  misc_feature (555)..(555): n is a, c, g, or t
gaaatggagtctcactctgtcgcccaggctggagtgcaacggcgtgatctcggctcactgnaacctctgcctcccaggttcaagcgattctcctgcctcagcctccagagtagcttctgtaaggctataaaccacagagattttcaagtaccactcagtgttcaggaagctgaacattaattacaagtgcttcttgaaagtacaagggtgaggatcttcctggaagtactattggttagataaaatctctcctggtggcagtgcctctaatcagagtctggggaatccaaatgagacgtggcaatcaagaataagtacaataaaagtccaaaaaggcttcaaaatttccatctggaggaagccaagtgtcataaggagactcaaactgggtcaggtacagagaatggtaaaagcagcattctaaacctagccaagagccatttgctgtacactcagccgcaaaatgtgcatnaagactctgtttggganctanaaattgtttcaggccagcccttttaaaaggtcccccaggctantggcattnttttggcnctngctaaaaa

SEQ ID NO: 59356 - DNA, 469 bp, Homo Sapiens
  misc_feature (429)..(429): n is a, c, g, or t
  misc_feature (440)..(440): n is a, c, g, or t
  misc_feature (444)..(444): n is a, c, g, or t
  misc_feature (447)..(447): n is a, c, g, or t
  misc_feature (449)..(449): n is a, c, g, or t
  misc_feature (456)..(456): n is a, c, g, or t
  misc_feature (459)..(459): n is a, c, g, or t
aagagacggagtctcactatgttgcccagtgcctaggctggcctcaaattcctgggctcaagtgatcctcctgcctcagccttcagagtagctgggattacaggcatgcaccacactgtgcctggctcatctcattttctagaatggatatattgacaaagaaaagagaagaaataagaaatgcaaaaaatgcaccttcaccatatggccctttagctaaaagctacaaagctaacaagggtgtgccatcagaactatccatgtacatgtacagagatgattttaacagctgccatgtgacatgtggcttaaagtcaccctgagtctactaaatggttgtgttgtcaatatatctaaatatggctacgtgctctccagagtgttcccatgatcaccacgtcctttgatcagtgccatctggaagaacanatgagtgcaancctnctntnatctctntgngctggcttcc

SEQ ID NO: 59357 - DNA, 1922 bp, Homo Sapiens
tattctgtcgtttgggttatactgagaaataagagttggctaaagtagaaattacatgagatttggaaggtcaaaaggaaggagcaactattgctgtgaaagtctttgaaattagagacagtgaaggacagatgcagaggtacccagcaggttccaatttttcctatcttccactctatatccagcccttctttccatcttccagccctgctgaccaacagtagccccaggtctaccaccagatgcttggctgcaggctcacaaaagcttctcatggacttctccaccagcttctcatggcagccccacatcagcagctagatgtgcctggcttctcagattttcctgaaagctctgatttatccacccatgctaatgtctcaaaagggctggtttagtgatttctttagtcttctaactcccccttctaaaccttccccagctacctctataaattgtgcatgcatcccttattccataatgctcatagttattatgcttccctgattgacatatttatactttcttttcctgagaatttggtagatgctgctcttctaaaattgagtgatgttattaagaagtcttagacaaacttgctctcttttttcttgtatataatgtgcctttctgccatatgattctttttttattcttgaagttaaggatctatggaagcatatgctttggtcctgatctttgtgtattaattttacctgagttatagtgagccattccaatcattcatttcaaggaagttttattttgcttaacattttttctgatccatttcttctcttcttcagggacatcaattatgcatatgtaagatgtctttgtcaccttctacattcatcttctaccaatcaacatccatttcacatcattattcttttcagttttgtgtgattgactctagccttgtcttcagagacaattctccttgaatctcatgttcttcatgtttagacattaacaagcaatttgctcagatttatttacattccaggatagtaaagatagagaatgtctccctccctggagactttcccagagaagatttggttgcattccaggttaataaagattatatatatatatacccaaagaagaggatggacaataaaacaatataacattatttccctcacatcttaattatgtgtattttcaatcatgtagaaatattgaaaacacagtacaacctatataacatccatctagatttaacaatttatatgtaatttttcctgaaataccagtggtaagttatagatataacattataaccataaataattgagcattcatctcctaaaaataaggacattctcccacatacctggaatatcattatcaatctaattctatgatatatccagtccatttccaaatttctcccattgtccccaaacatattttacagttttaatgaggtagaattagcatacagaaagtggaacttgtttaaagtgtacaatttgatgagttttgacgtgtgcacctttccaaccatcatgacaatacaaataatgaacatatcaatcaccccaaaaaagtttccttatgcctctttgtcattcagccccctttccccacattcttcccacatccacaggcaatcatggatctgttttctattgttatagattagtttgcgtttcctacaattttatacacatggaataatactataggtactcttgtttggctccttccatccagcataataagtttgagattcattcatgttgttatatgcgtctatgttcattcctttttattgctaagtgttatttcattatatggacataccagaatttgtttatccattcatgttttgatggaaatttgtatttccagcttttggctattacaaataaaactgatgtgaacatttgtttaaaaaaaaaaaaaaaaaa

SEQ ID NO: 59358 - DNA, 1555 bp, Homo Sapiens
atttcaagcactgactgctaagattggcatgtctccagccacgtacatttgcaaaaagtcagatttgcaatgtaatatgtcatggagctcatgcttgttgaagagaatctttgataggctggacacattcattttagtaggaggcagaggtggcctaacagcaaactctaggttcaggatctaattttcatagccttcaaggatgaatgcaatataaactgtgtagtagattgtgatgctcattccaactagggaggcaagcatttgtacctgctatctacaaggcaccaaataatgcatgtgtcaccattgctataaattgtcctcttccaggacctaactatttgggtaaagaacctacagttcccatcaccacctatgtatgtatgtacaaacataaattagtccaaattctaattttctcttatttttctttgtggaaaaacagataagaaagctcagtaaaggaagatataagcaattaatgttacagttcttcaatataataatttgaattaaatgtactaagaagcaaaaactattagtgttgagactatcatgatgaagcttttggtttttttaatatattttcatttttatgcataaaatcttaatacatagaattccatgatgtcatcaggcattaacaatcacttaccttagaaaccaactctttttatctaggcttaacagggtttgtattaatgtattggcctagcactgggccctgctagatgctcaataaatatttgcctaatcactattagacattttaaaatatcttttggctgggaacagtggctcacacctgtaattccagctctttgaaaggccaaagcaggaagatcccttgagcccaggagtttgagaccagcctgggcaacatagggagaacctgtccctacaaaaaatggaaatttagccaggcacagtggtatgcacttatggtccctgctacttggaggatgactcaggaggattgcttgagcctcctaggatgtcaaggctgcagggagctgtgatcacaccactgcattccagcctgggtgacagagcaaaacccagtctataaaaagaaaaaacatatttcagtttatttttatttctgtgttaattgtttagaaccaagaaaatatgagtaccttaaattctgtaagtaaagaggaaaatgtctttaacattgtaggaaattaggaattaagtaactgcccttcatactggtaatcttgatatgttgagggaagtgacttgttataagatagaggccaggtatggtggctcatgcctgtaatcccagcactttgggaggccgaggcgggcggatcacgaggtcaggagttcgagaccagcctgaccaacatggtgaaaccccatctctactaaaaatacaaaaattagccaggcgtggtggctcatgcctgtaatcctagctactcaggaggctgaggcaggagaactgcttgaacctgggaggcagaggttgcagtgagccgagatggagccactgcactccagcctaggcaacagagtgagactctgtctcaaaaaaaaaaag

SEQ ID NO: 59359 - DNA, 1837 bp, Homo Sapiens
gaaatcaattatgcaaaggaggaggcttgtcggctgagagagctaagggagggagctgaatgtgaattgagtagacgtcagtatgcagaacaggaattggaacaggttcgcatggctctgaaaaaggccgaaaaagaatttgaactgagaagcagttggtctgttccagatgcacttcagaaatggcttcagttaacacatgaagtagaagtgcaatactacaatattaaaagacaaaacgctgaaatgcagctagctattgctaaagatgaggcagaaaaaattaaaaagaagagaagcacagtctttgggactctgcacgttgcacacagctcctccctagatgaggtagaccacaaaattctggaagcaaagaaagctctctctgagttgacaacttgtttacgagaacgactttttcgctggcaacaaattgagaagatctgtggctttcagatagcccataactcaggactccccagcctgacctcttccctttattctgatcacagctgggtggtgatgcccagagtctccattccaccctatccaattgctggaggagttgatgacttagatgaagacacacccccaatagtgtcacaatttcccgggaccatggctaaacctcctggatcattagccagaagcagcagcctgtgccgttcacgccgcagcattgtgccgtcctcgcctcagcctcagcgagctcagcttgctccacacgccccccacccgtcacaccctcggcaccctcaccacccgcaacacacaccacactccttgccttcccctgatccagatatcctctcagtgtcaagttgccctgcgctttatcgaaatgaagaggaggaagaggccatttacttctctgctgaaaagcaatggaacacaagggagtgtgcagctggagacagccagggaccacatgtacacggcctggtacgctttgacaaggactttggatcttactctgagtatgagagaaagcactgggaagtttcaaggaagtgccagacacagcttcagaatgtgactccttaaattcttccattggaaggaaacagtctcctcctttaagcctcgagatataccaaacattatctccgcgaaagatatcaagagatgaggtgtccctagaggattcctcccgaggggattcgcctgtaactgtggatgtgtcttggggttctcccgactgtgtaggtctgacagaaactaagagtatgatcttcagtcctgcaagcaaagtgtacaatggcattttggagaaatcctgtagcatgaaccagctttccagtggcatcccggtgcctaaacctcgccactactgttttccagactggaaaaaaaaaaaaatctctgcaagtgaaactgtatagagtttataaaatgactatggataggggactgttttcacttttagatcaaaatgggtttttaagtagaacctagggtttctaattgacttgatttctggaaatgaaaacccgcgcttttattatgggaagcttcttgaactgcatttactattgtgaagtttcaagtcccgctgtaaagatcatgttgttttgttttccccagggctttcactgtgatttactgcattgtaggctgtatgataaaacacacataatttaaagagagaaggctcttgattccttatgcaagtggaagagttgaaacttgattgaaggacttaaaacattcacaaccttaagccgaggtggggggatatggggattcaggcagttgtttacacactttgaataactgcaaaggatttacggtttgtgaaaaatgtgtactgtggaaaagataataaattgaagacatt

SEQ ID NO: 59360 - DNA, 1563 bp, Homo Sapiens
tttcaggattcaacaattgcttgttgatttggggtgaagatgccatgaactcaggagcgggtgaggagggcctttctctgcctcccattcccaaagcattctccctaaccccatggtggaggctgcggagagtgttgtaggcagttgcagtgcccgtcactctctgggtgaagccagtatgtcctggtggtggccttagaagacagcccctgtgaggctcagtaagccgcagcctagattggaacagcgtgactgcctggtaggataaaggagacgacatctgaaaagagggtttcaggtgtttgcaaagaggtcagatccctacacatgaaacgctgcggccacagctgcagccatgctacctgccacatgccctggcctgcgtcagcgttatggagtaggcaacctggttcggcgcaaagaggaaatgcgcgttctgtgcccagtcctcgctcccctttgccaaccgggctgctgagtgtgatgctccctttgtgaagtggacatctgtctaatgggaactggacggtgaccaccagtccgttttacacaggccaccatacagctgccaggtggcgctggctcttagctgttctgcaagtccagcacagggtgtattcagctctagaggtggcaaacacggggcccttccaccaggcccactccctgcaaaggaagtgcttccgagagccaaggctttgctctaatctctgtgaaggaagaaaaagacttggggaaaggtaatgaataaattaaagacacacttttgtaatcgtatattttaggctttcctctctacctaattgtgctctaatctgtacttaggagtatagttttttaagtgggacatgtcaggcttttatgccacagattaaactccaaggcaaataaatgtgtgacagcttaagaggcgaaaagaagagtcttcgtcaaatggcagagtttgattgtttaacctagactaatcagtctttggagggcctgccacatgtcttccagacggctagaatgctcaggagataagagtggggcctatcgctctgtggctttctccccctgcattagccgcagagctgagtgagtctatgaaaacccattggtcgggctgccctagcaacacagaatgctgtgctgacacatactccatcacatgtttgcgatgaaaatgctgtatttttagaacacttcaaagtcaggaaaccgttaaaccacactgcatcctctcttgccctctggccacttcctccacacccccaggaacattgcccccatttcacagaaaaggagcctgagacaaagattaagtgatattttaagcaaagctgataatcccagggaaaattgctgatcaagtcttgaaatccaacacatccttcggagtaatttttaatgctttcgcttcttttacctaagccatgtgtgttccatatgaccttaaacctaagccctaatattgtaaatggagttcagaagacaacttagtctcccattttctttcctggcattcattcaaataaaaataggcacgtaatactgtactgttaaaaaaaaaaaaaaaaaaaa

SEQ ID NO: 59361 - DNA, 2334 bp, Homo Sapiens
ttttggacttttttgctgtggactgcaccaaaaatgtagacagtcagttgattgaatgatacaatttttaaaaggtaaaagctttataaagccttataaataagttaaggctataggcctactgtcttcacttttgagaaatagagtttgtggatggacgtacttatactgttgcattaggggctcgtaggccaagattggtttctgcaggaaactcaattttgtttgtcccaagttaaagataaatctcatgtgatttaaaatgttttgagatgttgcacttaggctgggaaagagtaaagattacagaaaaccaacttatagatgttttttagcattttccttttttaaaaattataccaaatatgtaatatatttgcttccacttagatatatctaagtttattaagatggtttggggaaaaatttgtgtatttaccaattgttcacatagaaacaatcttaaataaataacttgatttttaagtgttatgcctgggaggaaggctggcatagctggaattcattagttaatacagaaaaccaggatgttaactgctgtattttcattgtcatgcagagcctaaaagtagactttaatttgtgttataaaataaactgaagacttgagaaggcaggaagcctgggtggccaccccacacatttactcctgtattgttagggtgatccttcattgttacaatcattttctttttatagcatagttaagaacaaaggcttgggagccaggatgccacagtttgaatcccagccctgtgatcttagacaagttatttaacctcactgtatcacagttttctcatgtgcaaaatggacatgagtccgttttgtacctgctttacagagttttgtgaggattaggtgaattaaaccacgtggaacagtgcctagcacagagaaaacattatgcaagtgttagttgttattgttttcattcccatttattttccatttaattgctttaatcttaaagactgggacagagaaagcactatacaagtgttagctattattattttcatttccacttattttgcattttgttactttaatcttacgaaagagtaatatgtttctactttgtatgcatgtttgtgtgtgcacgtgaataagtgaaaataaaaaaaatttttcctgtttgaataggacaataccatttgaggggttatttacaatcctaaattcttagaactgcctttgagtcatgccttttctttatttccatatttggttacttgcaggtcatgtcagtgattagtttcacttagacatctttcccctgctatatttgagatcctcaagatcgggttcattgattcactagaaagattgacacattatagtcatacgcatggctgtgatttatcatagccaaaagacgcaaaacaaaatcagcacatggggtgaaatccagaggaaaccagacacaaggcttccaagagtcctcttcctgtggagtcacaggacaggctaattcagattgaattaagacaacatgtgtgaaatattgtttatcagggaagctccttagagactttattcagtgttagaggctggtcatgtaggtgcccttggctaatgttccaaaattccaaactctcagaaggaaggtaggtggtcaacataaaccacatattttatacaggcatgaagcacagtgagccattcttaggagttagggaatggtgaggtcccctctggataaacaaggtcccagacacctgccaagggccaaccttgcaagcaagactttctaaggacagcagcagcaggcctgctgtgggaactcttttctgcccacctgcccataattaccctagtgtttgtcctcatcatcttttaaacctcatttttcaaagcctattaactggcttccctgagttccagcatactgtacttggatctgtcccactaatctcctatctttaactaggcttttattgtgtctttttcctgctcatgacctttcattagctccttatttaatcatgtctgtaaaaggactttgggggccgggcgcagtggctcatgcctgtaatcacagaacatggggaagctgaggcaggcagattgcttgaggccaggagttagagaccagcctggccaacatagtcaaactctgtctctactaaaaatacaaaaattagccaggtgtaggggctcatgcctgtaatcctcccaagaagctgggctgaggcacgagaattgcttgaacccaaggggcataggttgcagtgagccaagatcatgctgctgccctccagcttgggcaataaagcaagactctgtcccaaaaaaaaaaaaaaaaaaaaa

SEQ ID NO: 59362 - DNA, 718 bp, Homo Sapiens
  misc_feature (607)..(607): n is a, c, g, or t
gtttatggacaggttaattcatgtcaacaacaaaaaaatataatgaaagtttcacaattctagcatgcttgatggcttcctatttaaaataaaatggtaaatgatgtatttatactacattaattatcagtactgacctctgcctgtggatttacctatactgatatctttcataacagacatatctggatcatttgaatgtacttcaagttttttcagactgacggtaggtttcatttcctgaagttgctttaagacaagctcagtgcgatctttaagattcttgtctaaaacaatttttacattatcactgcactgaagctgtgatggattggcaaactgtacaaacgtttcgctttctttacaaggacatacatgatttccactagtcacagcagtcttatcaatattttttcttgaatttgaatgggatccttttttgtttccagtattcggatggtctttgtcagtatttttcttctgcttcactgcagactcctcaagaaacttcagaaatgatacttcaaatcccattggcttaaaagagctccagtcaaaagatgcaggatgctcctcaatggtttgaatggcacagcagtttcttctnctttacgcacgctacttaactcagctgctgatgctggttcagctttttcaactttcctttttttaatttgtgagacattttttccttattaactctcttcaaattacctgc

SEQ ID NO: 59363 - DNA, 566 bp, Homo Sapiens
tttcttaatacatgccaagaattgtgtggctgtaaaaatagaaacaagttagagacaaaaggatgctgacaaatacttaactaggagcactatttgtttactgcactatacaccaaagtcaatcattataaagattcacgatggaagttggttcaattgtgcccagacgtcaaagctagctatctgatgagtcgctgtgccatagcttgatctatgtttctatcaaatatggtaagtataaacttcattcatactggccagagaaatactgcactacccctcctcaaaaaagtgcaacttaatgctttaggacttataaggcttgttataatgctgcatgatgattgaatattggcatttttcagacgaaggaggaggcagttaagtcatctacattttagtaaacccattttgaaaaaaaaaatcaagaaagcaacaaaatcaatcagctctgtcacactacttgcaattttctcatttgacggtttttgaactttacttgttttttttgtttttgtttttttccaaaaatctgaccatgtattcagaaacgcctcactgcacac

SEQ ID NO: 59364 - DNA, 2280 bp, Homo Sapiens
tttttatacatcttatatctctttgcagattacagttctatatttgacttcccataacatgtcacaggacatgtgctttaaatcccccacaagttgttctcttgtggatatagtctaggtcttctgggttgtcccaaaatatgatgtgcacagacacaaacatattctgtatattggttttgattaacacagaatgcagtgggatttccttcctattatcattatatttcccttaatgcagtccaagattatgtattagtgtctaaagaagtataccacattcttaggtcttttagaaagtatcatctgcctctttggactctgggctatctttactaattcatctcaagtattatttttgtctcttcttttcatctaagactaaatactctccactctgctgttctactcagattaatgtatggccatatggcagtagacttctttatacttagtgctttctcaattttaagatgtttgaatattacactgatgcagaagttatttcataagcatagctttttcttgtgtggggtggaaagggaagaggattaaatcactgcctcacttgagcacatacatagctggaaaatgtgtggaaagtttcttgatgttgagaaaaaaagacagtgtcttgttaatcaataaattccgtttatttttcttttactatgtcctttactatatcataactgtagccttgctatatcctgaactcctcacaaaggccttctctgagccaactaaattaatgataaagaattgtaattcttggctgggtgctgtagttcacgcctgtaatcccagcactttgggtcactgaggtgggcagatcacctgaggtcaggagttcaagaccagcctggccaacatggcgaaaccccatctctactaaaagtacaaacattagctgggcatggtggcatgcacttgtagtcccagctactcgggaggctaaggcaggagaatgacttgaaccctggaggcggaggttgcagtgagccaagattgcaccactgcactccagcctgggcaacagagcgagactccatctcaagaaaagaaaaaaaaaattgtaattcttatacccttgctctgcttctttatcattgtgtaattttaaaaacaactgacatatattatacaggtacttgtttattgtctatttctaccactaaaatggaagctccaactgctattagattaatttccctcccaggtccaattttgattatgttactctgaccaagctgatcttttctcttcaatctagaccttttaactaccttcaaaaatacaataaatataattattctagacttctttatgtatgtgtgtgttcctaatttaactgttgtgtaatcacttgatagtataaactgtatttttttagaataaactatttttaaacagctttattgaggaatagtttatgtacattaaactgtaggtatttgaagtgtatgaattgatatgttttgatgttatgtatatactcatgaaatcattaccacaatcaaataatagacgtataaattaccccctaaagcttctttttgtccatttgtaatccatcccctatcctgtccccaggaaaccactgatctgctttctgtcactacagtttgtattttctagaaattggtataagaggaatcgcacagtctgtactgtttggcttcatttacttagcttactgttttgaggttcattcacgttgttacatggcttagtagtatttttttctttttattactgagtggtatttcattctataatttgcttattcattgatttgttgatgggcatctggattatttccagttcgaggtcattacaaataaaatctctatggacatttgtgtactagtctttatgcttttatttcttatgcttttattctctttgataattaactatctgtggaatggctgagtcatatggtagatatatgtttaagtggtaagaaactgcccagctgggccaggcgcagtggctcatgcctgtaatcccagcactttgggaggtcgaggcgagcggatcacgaggtcaagagattgagaccacggtgaaaccccgtttctactaaaaatacaaaaaattagccgggcgtggtggtgggtgcctgtagtcccagctactcgggaggctgaggcaggagaatggcgtgaacctgggaggcggagcttgcagtgagccgagatcgtgccactgcactccagcctgggtgacaaatggggactccgtctcaaaaaaaaaaaaaaaaaaaaaaaaaaaaaa

SEQ ID NO: 59365 - DNA, 2250 bp, Homo Sapiens
tttttttttttttttttcaaatgaattcacacttaagctacttaatagaaaaaaatgtgaacctttatcatttagagctactaaacacttcattaaacaatatcacttaatctttgctaaacacgaactagaaaaactaggcacaaatagaaactgtatagaccagatatacattagaatgggtctgctttagcagttaatggtttaatcattaaccaggtcagggtatttttctctaaggcactttatgtgttgctgactcttctacaatctaagtggctcaatgtaaaccattccccttgtgctaaacatgcgtgtttatacttaaagtcgatttcactgaggaaattagggtagggtcagtttgtaaggttttgccctaaaccttaaaaagaacacaaaatccttcaggtcttaagcaagattgatgcccaggccctatgaaggacacattgaatcttctgtatattttttaacaagctccacaggtaatttggatgtggctggcattgcctcgtgcacacctaaagtaaccatgcttagaaaacgctgtgttatccaaaagaaacacagcacagagaattctatgaacaaactattgcagtactctaagattttaaaataagtaactttctcaaacactgatatggggtttagagttaacactgcgggtaagcaaacccaccaggctctctcagttgacacagctcttctggctccttcgaggaagtgaggaccagtatgtggaagagcctttggggctggtgtttctcaagctacagcttcaggcaatctcagggacagaacctggactgtgcatctgacagccgcctttctacctcccacctccaccccattcttatgtccaagtagtttgaaactattgagctagatcagtatatcccgaacaccaaattgttaagagtggatggagccccagtgatctttcccactccccagaccagtgaatcaggaaatctctactggaggttctgcagtaccccaggttctttatctaaacaggaaagttaggaaacaccaatttaggtcaaactcattttaagataaggaaatcaaggcccaagaagtttaagtgatttcaccaaggacttatagctgattaatgatagctgggagctgtgaaacctggtgagctaattcttccctcttagaccaatactgcttgttatattatgtgtaatcatgagagccccagtatctgtgcagtttctgattcaccaggaagaggccccaagtgattaataaagcctgaacccaggggcatgtcagaacgcaccactggtttaaaggatgactgacatggtaaagtgtccaacgtcaacctgccctcggaattctttcactttcagtatcagtaggagaaatatacaattgtacatttcatagaaaagtaaacccagccccacacagttaacaaccaggtgaagcgggaacacaggacaattcaaagttttcggatcacaccatttcttggtcaaatattagtaccttcagcaaaagacctctaattaccacacacttttggttatggcaacagcctgctccttacttttgggagagaggagtactccacacccatggcctgaaaccaggatctccaaacccatcaaagagaaacatggatgggaaaccaaaccccccaagcttggaaagcatccagcaagctttaattcagggagagttcaatcgagatataattgcctctaattggccctcccacacgatctcacaacatacagctataatcagttccacaaagaatatgttatatttcttttctcccttgaaaagccagaatcctctcttgttaggtacttaccatcactgttttgatttttgtaaatataccgagacattaaaaaaggaagaatgaatgggtaaaagcaaagaagtagatggatttctttttttaaaataagcactgatccctatgaccttaatgataacccagtgcgattcaaatctgtaatggagactgatgtcgactcaggaaacctttctagtccagggcacatgtgatccaaaaaacacattcatctggtcggacattttccatactctgatttttatctttcttggcatgctcaactctcctttaataaagtcacaaccctttgtagccatggaacccaatcagacacggagcctgttactatgacttccctgcagatataaaaaaagacccagtgaccaaaagaccagctctttcttaaaaaaaaaaaaaaaaaa

SEQ ID NO: 59366 - DNA, 2461 bp, Homo Sapiens
gaattgctttcctctggggttccacagtaaagcagccacttagggttgtccacctgtactcatggcttgctctgtacgatgacagtttccccagagcttatctcacaggcacccccggagcagtgagcaatgcactcaactgtgtgtagagaccatgggtattacagcggggtgctgggaacacccaccttggggagtggagagcctgcaagagaagtcacctcctggtcccaacacacctctcggctgcactgtggcctatgacagtgataagccacatagtgctgcttcctcctggcctgggagcacatgtggccttggccatgtctctactccctggggttcactcccacccacctggctccccactcctcaatcatttctggagcagcagtgtgcccaggggacttggggctcttttcttcaatctcttactgagattgttacacagataatcttattttgcagatgaagcttcaggtttagagacttgaggggcacctccagggctccctgctagttggcactagagcaaggaccaggactctaaggttgcctgtctcccaaagccttgtttgtgtgtggtcagccttaggtcacataatctgggttgccaggtgggctctgttctgcccccttttaagcgctctcagatgtcttaggaccaccaccaccagcagcagcagcccctgggtgcctgttacaaatgctcatccttgagctgcacctgcgccctactggattggaacctctgaaaggcaggcccagccatctgggttgtaacaagccctccaggggcttgtgaggcacactcaagtgtgaggatccctggcttagctcattggaggcacctgtggagattttaaacccaggtccaccccaggccaggaaaatctcagcctctgggactgggaagcaggtgtcagaggttttcaagcttccagggggttatagtctgagtgtttgtgtccctccagtattcatttgttgaaattctaactcccaaggtgatagtgttagaagatggagcttttaggggaacgattaggtcatgagatcagtcccctcaggaataggatttagtgttcttataaaagaggcctgagagaaagccctcaccccttccaccttgtgaggctagagtgagaaaatgtcatctatgaaccagcatgcaggccctccaccagacaccaagcctgctggcatcttgatcttggacttcccagccttcagagctgtgagaaataaatttctgttgtttataggccacccagtctatggtgttctattatagcagcgtgaacagcaggtgagaatggtggcctgagacccacctcttgcatgggtggtctctgtcaagctggctcagggtagaatagctgggcttgcaaggcctagaatcttcaacaagctggcaaacagatgaataaagggagaccgccagccacatgtaagacaccaaacctgtcttccagcagggtctatgtgtgttcagcactactcccaagccctgtgaacatttgtttcttcactctatcttggagaccacgggttttgtttctaagctttcttgccctgggaaacaccagggtgtgtttcacactagctgcattttaaaatctctttgtattgaagtcaacagggaatgttcctgccttgtcctatttgtgggtctaatcttgccatcgggtcctcagttgcctcagcacttgccactcccacccactcagaagccagggctggccgaggtaacagggcgaggtgcccctggggctgagggcagggccttggggcacatctcccggctgctctctgacactcccaggcctgggtggactctggtgcttcggggtggaatgaggcccagggaggcccaggtaggcctggtctctctccccaaaggctctccaggcctgaggagtttctcagcaggctccatgaacaatgggggtggcctgtctgagggctgtgaaggtcagggatggtctgagctacaccagtgagtgcgctttggtttggtcagaggcaccaagcacagtctatccctggctagtgggccacggccacacctcggtttgtgtgccctggagtaggttccactgaggcccaggactatgttcacattccaccttggagagtaagtttaaataggtacatgtctaggctatcctacggacgcttctgaggttcctgatagagtgtgactcccatttcttttggttgaaatgtctataatagaacaataaaatccttgaactaaagattagcagccttttttagaagctgactcagaacaaaatggatttgggcccagcccagtggctcatccatccctgtcaaaacctttgtgccaggagctcagcctggctccccagccctgggcctgcaggagacctcagggcccactcagtgtccacgttattgggatcagggacactgatatgaaaaaaaaaaaaaaaaa

SEQ ID NO: 59367 - DNA, 5726 bp, Homo Sapiens
tgccatgctgctgcacggacaggatgtgatcactgtgtccaatggaggccgaatcatgcgttcctgggagactaacatcgggggcctgaactgggagataaccctggacagtggcagtttccaggcacttgggctggttggcctgcaggagtctgtaaggtacatcgcagtcctgaagaagactacacttgccctccatcacctctccagtgggcacctcaagtgggtggaacatctcccagaaagtgacagcatccactaccagatggtgtattcttacggctctggggtggtgtgggccctcggagttgttcccttcagccatgtgaacattgtcaagtttaatgtggaagatggagagattgttcagcaggttagggtttcaactccgtggctgcagcacctgtctggagcctgtggtgtggtggatgaggctgtcctggtgtgtcctgacccgagctcacgttccctccaaactttggctctggagacggaatgggagttgagacagatcccactgcagtctctcgacttagaatttggaagtggattccaaccccgggtcctgcctacccagcccaacccagtggacgcttcccgggcccagttcttcctgcacttgtccccaagccactatgctctgctgcagtaccattatggaacgctgagtttgcttaaaaacttcccacagactgccctagtgagctttgccaccactggggagaagacggtggctgcagtcatggcctgtcggaatgaagtgcagaaaagtagcagttctgaagatgggtcaatggggagcttttcggagaagtctagttcaaaggactctctggcttgcttcaatcagacctacaccattaacctatacctcgtggagacaggtcggcggctgctggacaccacgataacatttagcctggaacagagcggcactcggcctgagcggctgtatatccaggtgttcttgaagaaggatgactcagtgggctaccgggctttggtgcagacagaggatcatctgctacttttcctgcagcagttggcagggaaggtggtgctgtggagccgtgaggagtccctggcagaagtggtgtgcctagagatggtggacctccccctgactggggcacaggccgagctggaaggagaatttggcaaaaaggcagatggcttgctggggatgttcctgaaacgcctctcgtctcagcttatcctgctgcaagcatggacttcccacctctggaaaatgttttatgatgctcggaagccccggagtcagattaagaatgagatcaacattgacaccctggccagagatgaattcaacctccagaagatgatggtgatggtaacagcctcaggcaagctttttggcattgagagcagctctggcaccatcctgtggaaacagtatctacccaatgtcaagccagactcctcctttaaactgatggtccagagaactactgctcatttcccccatcccccacagtgcaccctgctggtgaaggacaaggagtcgggaatgagttctctgtatgtcttcaatcccatttttgggaagtggagtcaggtagctcccccagtgctgaagcgccccatcttgcagtccttgcttctcccagtcatggatcaagactacgccaaggtgttgctgttgatagatgatgaatacaaggtcacagcttttccagccactcggaatgtcttgcgacagctacatgagcttgccccttccatcttcttctatttggtggatgcagagcagggacggctgtgtggatatcggcttcgaaaggatctcaccactgagctgagttgggagctgaccattcccccagaagtacagcggatcgtcaaggtgaaggggaaacgcagcagtgagcacgttcattcccagggccgtgtgatgggggaccgcagtgtgctctacaagagcctgaaccccaacctgctggccgtggtgacagagagcacagacgcgcaccatgagcgcacctttattggcatcttcctcattgatggcgtcactgggcgtatcattcactcctctgtgcagaagaaagccaaaggccctgtccatatcgtgcattcagagaactgggtggtgtaccagtactggaacaccaaggctcggcgcaacgagtttaccgtactggagctctatgagggcactgagcaatacaacgccaccgccttcagctccctggaccgcccccagctgccccaggtcctccagcagtcctatatcttcccgtcctccatcagtgccatggaggccaccatcaccgaacggggcatcaccagccgacacctgctgattggactaccttctggagcaattctttcccttcctaaggctttgctggatccccgccgccccgagatcccaacagaacaaagcagagaggagaacttaatcccgtattctccagatgtacagatacacgcagagcgattcatcaactataaccagacagtttctcgaatgcgaggtatctacacagctccctcgggtctggagtccacttgtttggttgtggcctatggtttggacatttaccaaactcgagtctacccatccaagcagtttgacgttctgaaggatgactatgactacgtgttaatcagcagcgtcctctttggcctggtttttgccaccatgatcactaagagactggcacaggtgaagctcctgaatcgggcctggcgataaagaacaaagactgtgcctaaaagtggagagccaggggagtgtgggtcagataagcagctacagctgcagtttggtggattggtggagtatgtgtgtgtgtcagtgctcagctaagaactgtagggaagatggatgaccttcacgcagaactccttttgggatatacatgatgcagaaaggatcctacatggagagagacagaactctctcagctgacactctcagagattcctgatgggctttctcttgaagtccaaaggcgtctgcattgtttcctttctttgcccatccatgaatgttctgttttgttttttttaataagaattccggctgatttttgtgaggcctgtttaaattgactttactttgccttttgtgtttctcaattttatctagaaatctttctgactttttccatctcttgcttcaaagtaagaggggaactctccttgccgactccaccttataggtacatttggtgttttgcactgggaagaaataggatccatccttagctgaggcttgaggactgatccagcctctcatggcttccctccaaagtaacttagggttgagggatctatatgtgatgtcaaaacttactttaaacctctagtttcgtgctgtcatttattaggctgggccaccaaatctttgtttcaatttatcagaagccaagtgcatactagcgtcttgtttgttgcccattgcctatacttttcacctgagatgtgtgagttggggccttttaaaaactactgaattgtctgagccttgaagacatttccagggagaagagataatctctcatttcacccacaggctggtctaatcataacctagttaaagatgtccttgtttaagaaccccattatttatttttagtttttaatataaattaacatgtgggtcattatatttctccttaaatgaggaaattttaaattttattgatctaacctttgaagctttaaaaaaggagaaagagggtaggggtgggaaactggcatactgtgtgtatagcactgccgattggctaggccactgtgtctctgctacaaattaaagaaatcctaaaagttttccttggtcatagagttggggaatgacagaatttttctttgttgtgaaatgtatgtacagagtagaccatctctagccctgtggtgaaagaggtacactcgaatgtttgcataaagcaagtgacaaatgacactgtttaagtcctcttttgtgtcttagaagatcattttgaggctattttcacattagaggggataaaagcagtgaagacatggagtaagtgtattttattttagtaaggaaaggtcagtttaatcatatatgggttggttaggttatctaaaaatttgtcatctttctatggtcatatgctgatggtagattatggcagagaaggaagaggaaatgacaaccattttattaattgtcagtttgatattgagtgactgaatgtctaagaatctccagaaaaaaacaggcatctatcatcctgacccaaggcatattttaacataacctgggagaagagagttaagtacaagttaaaaaaaattctgccctagttttgagaaagcctggctggaattctgactgtcttacatacatatgtgcaaggttagcctgcaagattctagtttttatttaccagtgtgccagaatctgaaacaagctactgggagggaaggtatttgtcctttagtaaaattccctgtatttcagctgtaatcaaagttacctcaaagcaggtgctttttttttttttgagaccctggctcaaaaacaaaaacaaaaactagtttgttttagtattcattaattacgtatatgagcactggtagtctagtgtttgttcttgtatacagtgttttcttaaatgagatgatgctatttaattctgttacttgttttttcaactaatggatcttttaaagttttttatttaaattttttgtgggtacatattaggtacatatacttatggggtacatgagatgtttttataaaggctcagctaatgtatcttgaatatcatgtattcataaagatgactgaaatagtttctggaacaaagtctgatagaaaaaatactcaattcctaatttaagtgttagagactttaatgtaagctatctaatctgaactagtttcattatttgtgtgtgggtacatgttatgtgctccgtaaggcatctttcaatttgaaaatttcataattgtaatttcactgcctttataaattgcttttttttggaggcagggtctctgtcacccaggctggagagcagtggcacagtcatagctcactgcagcctcgaacacctgggctgaagtgatcctccctccttagcctcccaaagtgccgggattacaggcatgagctactgcacctggcccataaattgtcatacttttaaagagcctattacacaaagtatcatcagaatcatcccaagactcatttcctgattcctaattatttaaaattttgcttttaggcgaggcatggtggctcaagcctatggtcccagcactttgggaggccaaggcaggcagatcatttgaggtcaggagtttgggaccagcctggccaacatggtgaaacctgaaaccccatctctaccaaaaaaatggaaaaatttagccaggtgtggtggtgcatgcctgtaatcccagcctcccgagtagctggggctcaggcgtgcgccaccatgcccggctaatttttgtatatttatggaaatgccaagagatagttcaatctgcctctctggcaagccatggacaccaggtctgacaaactctcttactccttaagacaaatgctcacctgatcaatatggggaaataagctgcatggtaccataatttctattctaaaagggaaaagtatctctttggtattgctttggaaaacattctttataactatcttgctatttaaaaattgacaattatccttccataattaaaacaggtagacaac

SEQ ID NO: 59368 - DNA, 1628 bp, Homo Sapiens
aggatttaaaatgaatgaaagaaggtagaatcattactttttagtggataatttactgacaggtctcatgtgcaagcaccaacagtaccactgatgtattccatttatgctggcacagctgaagccctctgattgcttttctcacctagacatggctctcattaatcaagggaagttgcatagactagaacaagaagacagttttgtcgacacacttccagcactgttctctagcagcatttcgttcctgttccggtatcattgctctcagaagcagaagccctttcatttagttagaaattagcagtagataccttctctctgaaccatctctgattttgagtgttgagttccagaaattcattttgaattcagttgtttggcatttctggtacagattttcctgcaggaacaatttaaagaaagtgcattaagtcctcctgctagcctatccaaagtctgtttgacttatatgacattgaactatctatgattgaactatccatgataacacagtgtactatccatgataacacagtgtactatccatgatttctagaatattacattcttttaaaaagaagagatgtgttcagtgtacactgattgagccaggcatggtggtggaatgagaaatacaatctatttagtgaaatggaaaattgcaggacaagagagaaatgtaagtcccagatgtgcacagagcactttgctatggaaaccacagagaaggggcatccacctcagcctggctccaggttctaaatggagagactatgagcattttcagctgcactctcatagaagagaggaacaatccttcagaccaggggaagacagaaaaggagactggccagaagaacacctgggagggagcacagagctcttcattcccaggggttctttatagcatggacatttacagtgtaggtactgcccaaatgcccatccacaccagtgttagggactgaattttgtttatttcatttatcaagatataatagttttgagtcatcagttgtatttctatagcctataaaaagagcaccaggcaaggcagggcccaccaccgctgcaaccacacccagagtcttccccatgctgtactgtggactccacatcagacctgggaggcaggactcagtggatgaggctgtgttttgcatttctgagtacagtccacaaaatggtttgcttctgaaaaagcagtagtagtcttacatccaagattattcctaaaataaagtttcgacccacatatataatgaaattgaaactgcctacattggcaaagccagaaagagagtaaaaaagatggggtaggccagttgcggtggctcatgcctgtaatcccagtactttgggaggctgaggcgggtggatgacttgaggtcaggagttcaagaccagcctggccaacatagtgaaaccctgtctctaccaaaaatacaaaaattagctgggcatggtggcgtatgcctgtagtcccaactgcttgggaggctggggcaggaaaatcacttgaacccagaaggcagaggttgcagtgagcctagatcgcaccactgcactccagcctgggtgacagagcgagactgtctttaaaaaaaaaaaaaaaaaaaaaaaag

SEQ ID NO: 59369 - DNA, 1904 bp, Homo Sapiens
tttttttttttttttttgcatttgcatttgcagttattcataaattctttgcatagaccaatgtccagaagagttttatctagttttcttctagtattttttacagtttcaggtcttacatttaagtctttaataatataaggaagatatttctaatagtcagccttctacaatttagttgggcttccttatgtggaaatgcattctctagtatttagtattttagaagccaaatggccaccttttagctccgtggtacaggacattcttgcctaaggtaagaagtctaatgaaatggaatcctgggtcccctgggtctatcaaattttatgatgccttaaggaataaaattgtttcagatttttacctggtgatgaaagaaataagtattgaacatggcccaataatactctacattccccaattccacaccctgcaatttttaaatttgatttagtgtttctgggtatttcagaagtcttcttactcccccacagaaatgctctactttttccattgccacatttttgtcagcattcttcactcattaacttatcctaatcctagcgcggctcagctggtccctgaaaactgcaagccaggctaatatttccttctctgacccatccactgtccctccaatactgctagtgctacaagccaggctaatatttccttctctgacccattcactgcccctccaatactgctagtgctacaagccaggctaatatttccttctctgacccattcactgcccctccaatactgctagtgtagcaattctaacaaaggtgagcgcagctggggaggtagtcagggcttggaaagggaaggcagggaaccaggagctctaaacattgttgactctaccaaatgtaattgagatgaagttctatgtttttcctgagccccaagccttccgccagatacctagtgctgccataggttgatgagggaggcaaaaaaaggccaggggtcatcaaaattgtggtcattattaaaggctctgaacctcactgtgatctgatgagttcagctagaccaagggttactattaaaagcaccttgcctagatagagacagatttggacaacatatactaaaacaaatgagtggtctgacttcacactcaggaggtacttgttgaacactgattgtatgccataagggattctaagtaatgaatttatacagagaataagagagatactgtctctactctcagacttacaatctagtggggaaaagaagagagacagaaaaaataactagattatcatcagatagtaaaaagatgcaatgaagagaggtaaaataaggtgatgtgatagaaaccagatggttaatttatatggaggaatctctctaagttattgacatttagactaagagaggaaaggaagatggagcctgtcatgataagattggggggaaattgttccaagcagagggaacaagctagtgcaaatgccacaaagcgggaacaagtttggcaagtttgagaaccagaaatcggaccaggatagtgagagcacaggggaaaggggagagtggcatgagatacactcagaaaggtaaaaacagtccaaatcacatgaaattttggaaaccaggataaaatgtgaaatgtttttctcatgttatgggaagatgtaggaacatttttaaaagagggtttgacatgaatcaaatttgagatttacaaatctaattatggtacaaccatgctgttgcaaatgataggatttccttctttttaaaggcagaatagtattccattgtgccacatggataaactggaggacattaggtttagtgaaattagccaggcacaggaagacaaatattgcatgacctcacttataggtagaatctaaaaaaaaaaaaaaaaaaaaaaaaaa

SEQ ID NO: 59370 - DNA, 1955 bp, Homo Sapiens
aaaaaataagaggaggaagaagaaacagaaaaagaaagaggagaaaggaaaaatatgtaacagagactatatgtgatctgtgaagctttaagtatttactgtctggctcttcacagaaacagtttacagaccccaccaaagtctaaagacccctcaggcacggcctcagtcctcttctgactcacacgctccctcctaaaacaagaaaagctctccaagtctttaccaaggctttgtcgatttaaatatgtgtgtgtgtttgtgtgtgattttttaaaaattgaattataaatagatttgaatcaccagttctcatggttgtggcatttgagatttaccagtggaagaacagtggaatattggtgcgcacataagtcagcgtggccagctacaggcgaaaaatcagtcagcagaattgtaaatggtatttctgttaaccctttgacttggttggaggtactatcacgcaagtatctgctgaacttgtttctctttgcgaagaacgaaatgtgagcaaaaatagatcaaacatgcctgtgaaatacaaatatactttcatctactgaaagcctaaccaaaatttttttaaaaggttctacttaaacaattaactttagaattagatagttatttaaaaaaaataataataatgacttaaccaattgtcctcccttcctgtggatattagctaagatttggtctttatccacaggagatgtatgagggtcatcattccttcaggttatgttttaaaacgctttcaatctccatgctccaaaacatccacttaccgtttcccggtgaattttccaaaacttagctctgatcctacctaccaattcccttgctttgaaattcttagacctatatgacctgccaaattgatctaatcaacattaaggaagaaatgaaaacaaattaccaaacatccctttttgtgttaattaattaatataaaagtcatggggaaatgaccagttgtacagctgtatattattcaacatactgcgctatataattctctgtgtcacaggacagttttcatacttgccttgagtccattggtaaattcagcacactaacaaactgattattcctccaacggtgaaatatttcccctttgctaccaagaagtgatttgacagaacattcaggtgattcatcagaaataaggcttatgaggtcagtttatgtctttaattctcaacctattccaaaatataactgggatcaacatttaatgttcattttcagtggtgcctgtggcttacataggcaggtaactaattttgtcttccccatgatgactctgaccccgagagcacacagaattgtcctgtgtccataggattcatctccagctcataatgcaaaccagttctaaggataaacagtaaagtcaaacatgtcatacttgttaatttcttctctttctttgcaaaaaagttcatatgtaaaaataaataacccaaattctgtaatattatagacatccagacgttaccattaagtgagtggcttgatttataaaaaatgagaacataaaatggataagtagaattttagcgagaaggtaatctcgaagcatatgagctcatcctgcatagtgtggacttgaggactcgctcctgggatccttactgctgtcaaccttggatgttcagggaaggaaacttgtgtgcaaacagtatcctagctaggtcagaggaggttataggaaagtaatattgatataccctcactcagcaggaaacaaacaattagttctgtactttttggaggtttaatcatctgagacttactaagggggcccaccattgacgggagagcaggagaacttgtatgtgatccagggatgcattgaatggttaattaggttacaaaacttattcccaaatggaatgtgttgaattaactctgaatatccctaaaactacaaaaaaaaaaaaaaaaaa

SEQ ID NO: 59371 - DNA, 2010 bp, Homo Sapiens
aaaaaccacataggtggtgtgccagtggctaaagtttgagaaacactgatgtaaaagctaaaagtttgaaatcagacagctctgactttgagtctcagtttgtctctatgagctttcgtttcctcacttgtaagatgcaaatgataatagtacctatgtcatacaaatgaatacaaatgaagtaaggattaagtgaaataatgatggtaaaacctccaacactggacctagtacaaaagtgcccactgaacagtgttacctctcatctatttcctccgtgctcaggagggctgaagaactaaccaggccgacgtctttatctttctatactgtccagtttgagaaagctgctaaactattgcctcaagtgcttatttaatgtttggaatctacaagagatacagtggttcttctttgaagttcaagctattcctttgaaaaacaatgtcaggacaacttgacattcatctccctaatgatagaatttcatttatttcagtctcactgtcttttgagccactatttagctttatttagtatatcattaaaaatatgaagttaaaagaaatcaaaaaccaaatcccctgtgtctctccttcttgcacccaatcagaagaaaaggctcttcgtcaaagttttacttattcaacaatattgtaattactttatttgtgctaagtactttatttgtgctaagttgttttgtgctatatagtttgtgctaaatactaggcattgaaaaagtagcagtaaacaaatgtctgccctttcctagcttatattcttgtaagaaagcttatattctagcagaaagcaaaatgaggacctttgttttcttttctttaaattacaaagactatgattataaaatcacccttgtaaatttttgaagagttttgaaaaatgcaaagggaaattctaggaaattcttacattttcttatattttcactgataactaacctaacctctctttcttctttcatttttagttgaaaagctttcaaacatattgattttaaagtttataagcctgtagttacagacagcagaaatgaatttttcccagaacaggctatggatatgaaagtataagttgttttgatttatagtctttattgctagagtagttattattataaaataaaaaaatacctttaaggaaaccaatttcaaattatgttgtactttccaaaaacgtgtttaaaatgcagttaactggagtaaatatgccatttattgttctgagtaaattggattctcacttgctctgtgaccttacataagttatttacactatttgagtttcttttcctcatttgttgaataagaggattgggatacacagtcttgataattcttgtgtatggcaaggcttacacaacagaatcagaaaggttgagctgtgtatccctggacaaattggttgaccactcaaagaccctcctttctaatctgtaaaataaggactgtgtttttctcacagtgttgttataagaaaccaataattgtacatataaagcacctaatatatagtatgtgctcagtgaatgatgtcatcatttcttcaagtatgaacaatcagtggtcatgactaaacacccacgtgtggcttctggtgttaacaccacctaagtacaaaacaagtataaaattcatttgctagcatcaaaagatttgaaatccatttggaggaacatgatacacacacacacacacacacacgcacgcacatgtatttgtaattaataattgatatatttggaatatcttcaaaatatcccttttctgctttcctttgggggagacaaagagtggagtgggaaaataatgtgcactctgaagccacagagacattatcaaatctcagttctgacagttactgactgtttaaattttagtggagcacttaaactcttgggcctcagtttcttcagttataaaattggccaatgacatctatctttcgtgtttattgggaggatcgagtaaaaaaaaaaaaaaaaaaaaa

SEQ ID NO: 59372 - DNA, 4515 bp, Homo Sapiens
ggaagatggagagaatcaggccatcactgggaaggaccatagggtggtacagactaggagaacaggaagcatgaattctaaataatcaggagtacagagacttcaataagcatgttagggaagtcagaactcgttaagttcacaatccattgtacatttactttcttactgatctttaactgtcagccactgttcatctccatcaaatgctgttcctctctggatagaacagcagacctggcttgtgcatttccggagaatggggaagttcagaaagcccccagactgtcagccagctgacttcctttttactgggctttttctctgtgcgaataagcaaaggaatcacacacggacagatggttgggtgggtgttcttgatagcgtgtatttggaagttactgtcaagtcagggtgcatgaggcataattccccctctgatttgctttccagtgggaacttttgtgtctgagagagagtgggagagtaaggagggttcatttccccacaaatcttttactcaaactgtctggcttctcagactatacctctagtcgctgagctaccttgagagtggtaccatttcatactagctaggagagtcttcatgttaattcctttgctcagtgagttcagcagtttacagggcagacattttccttcatttgattctctgtgagatgctgtgttaggtctaggggcttcattggacaatgggcacaaatcctggctgtatggggttgggagttggtggtctctctgcgggtggtggtaggtggtaggtggggaggcatctgggtggcacagactgtggaacaaagtagttgtgttatagtggaagctgggtggcttttcttcttggcggtgaaactgtgtctttgaagacattgcactttggcacctgtgccttgctaaggatttcatccctatcttgtctttgtcctgagattatatctcaggacctgccaattttgccagaaatgtcaagttaccatgcactgaaaaatctcagacagccaagaaatgtactatttttgctagcatcaagagcctaagtgataagagtgtccaggtggtggccactgctgcccctgggatatctcaggcctcctgcttgactgggaggcagcagccacgccagctgtttgggccccactcacaccagggcccccattgcattggagtctgccctactgtggaatttgggatgctgcccttgttgcattcgctctgctttgagtacttggtgcttcctaaaagagcacagcaagtgttctttgcaggtgatattgttcatgccctcaccttgtttagactctaaatggtacctgaaatggcataggttatcagtgtttattagctaaggcatggctcagccttgagtccctctcaagagctacaggaaaggcctttgcattgtctctaaatgatcctttgctgcttattttaatcacagaagccttaaggggactgatagttgtatgaagggtaggagcttgtttagcaggcaggacatattgtcattttagattcataacccttcattcctaaattagattgaaaatctgagcagctctgtgacatctacagtattgacattctcggttttgtgttcatgggttgccaacacagagcatactccgacaaaactgtaaaattgtatataacttaagaatgaatttttatgattggaggctctcctgtattgtacaagtcatcttattttggggttgcagatagtaataaatacagaagttttataaacttacatttggaaattaaataaagaaaaatcactaaggaagtatatgcttcaaaccaaaaatgaagctactcagattttcctaatttaaacataatgtattttcccattcttttccctaagacaatggtatctatcccctgtgctagagaaagtagtgtgatgtggttattgttatttagacccacttggaagttcctgagggacatggcgagggtggatggacttgtctgcctgtgtagcagtgtggaagccatgttttaggaaagaagtggtgggacatggagagaaagcaggtaagagagttgtgaatggggtagggtgacttctacaagtacacagttctgacgttctccttgcctttcagttgcaactctaactcatcagtgatgataggccgtcaggaaaatcctctttgtggatgttataaaccctaaataccaccctgtaaagaattcgcctcctcatgggagcagatgggatggccatacctaacacttgtctcttattgttaagcaaagccccatcttggtctttaaatcatttcctgtgagataggctctgaacatgtggcttttgaaaatccctttcttagggcccttggtttagaaattgcttgccttttctgtttgagattgggagccaggtttatcttaattcattctgtgtcacaaatgagacagaggacttgttactgcagacctacaatttttgtctggagaaaaggtatgaaagggatcagaatctcccctcctcaactccagcagtggcctgatctggcccctagagacctgactacaaggtgtggacagttcctctgttgtctactgtccaccttcaagggatcaaacccagttctgaaacccacaacctgtcagagcagagaagaacccaccatcaggcaaaaggactagacatagggcaggtggaatctaagaatatcttggcactacattgggtgaggaatatagaatgtggggagacttctgattggtctctgccccttggcacgctgaaattcctgactcatgaagggcaggacatgtgtttttcctcactctgttcccaacgtttagcacaatgcctggcacatagcagaagcccagtaaatatgtacttaaagcccgttagaattagtggtgctttccgttctgaatagattgggacagcctatggatcttgaaaggcataagcaaccaagggtgttagactctgtagctattaattaccaaacaaaattatagtcttgtactctaagaagcagccatgtcttgagtgagaaggcttaggatatgaggactagatatcagcaaggataccataggtttggaaagacattttaatttacccttagaatacacaactttactgatttttaaggatgatcagcccatcatatagcactttattttttcttttaaagacaatcctgtttcatttaccttcacttgacacaggagtttgagaagtcctgggcaggtatacctggttattttgtcattggtagtctttttaacttttaaaaaataatcctagtaaactaaacctgagcctctgaataagatgttgtctgcctttgtagctatatgagaagagtggcagaccacagcttttgacggggatttttgaataaaataactaaaaccaacaatacagcaaaagctcatctgggaaaaggacaaagagtaaactagtaaaatgtaaggctgtaaggaaaggggtagaagatcagaggaattctcatcaaaatattgcaaattatcccctgaacacaaactggtaacggtggtttgcttaagggaaggaaattcggagattagggatactgggtgaaaggcagattcttttttttaccatatattcctttgtatcttttaaattttgtattacattcgtgatctttcagaaataaataaataaaaatgcagtagcttcctgatcagaaagagggaataatcgctgtcacttgcgtttcagaaacatagcatccaaactgatgtgattatggtgacctgtcccacttagttttgctgatgtactataattactttctccagtgaggctgacttcagaaacagttgcagatgcagaattttaatccagggtatgctgtatataagtaacttttgcatttacaatctaccatttggcgttttatggctaataatccacaaatatctaaactaatttataaaggcaaaaactactgatttaatgtagtactctgcttctgtatccccgaggtgagtcagaaaaatttcaagttgccacgccttggccagaccccacagtatattggttattggtcctgaagttagttctttaaaataacttgaaatgtttcatgcttagttctaggatctatactttctttgatttgactgggactgaaaggctcagaataactgaatatccttggctctaaataagaagctgtaactttgggccaggtgcagtgcctcatgcctttgggaggccaaggcaggaaggtagcttgaagtcaggaatttaagacagtctgggcaacatagtgagacccccatctctataaatgctttttaaaagtagcagggcatggtggcatgtgcctgcaatctcagctacttggatgggtgagttgggagcgtcgcttgagcccaggagttctgagctgcagtgagctgtggttgcactactgagctgtgattgcactcaaggctgggccacagagtgagaccctgtatttaaagaaaagaaaaaaaaaaaaaaaaaaa

SEQ ID NO: 59373 - DNA, 1309 bp, Homo Sapiens
caaaaagataaaacctacaaagaaaaagagagtgaagaggagagagaaccgtggatcagatataataaaaaaatagatgggatggtagagtgggaacctatttagctgagtgagccactgcctaactgcgtacagagggggatactgataagcaagccagccagccagcattcttcacctgccttcatcttagaatgcctgcagctagattcgaactcttctgtctggacttcagcaggtccttttctagagagcctactgccatcacagaagggacctgctgataacctgcaattgtggtttccccaagcaaaaagtgagctcaccatctgatcactgttcattgaatttacagttgaacatgacccgtgcacactaagcctcgtttggatggcctgtgttcattagacaacagaaaagctaaaaggaatgaactgaataaaagaactcggaagaaatagatgatacaggcaataggaaagaactaaaaaacaaaacagaaaacatgaataggtctcagatgataagacactggattcactaaacaagaacaacatgcctacaaaggaagcgagagagagaaggaacaaatcgataacaagaaacgatgcttggaaataatatgatagctgaaataaagtagtgcatgagaaggctggaagatgtagttcattcttccagcaagtaaaagaaaaatataaagaaatgtaaagtagaagggaaaattaagaaagttagatgatcaacccaggaagtacaaaatctgcctaaagttacaaaaaagaggacaaaaggcattggaggataataaattatcaaagtaatactacaggaaaatttccctagtaaattatcaaagtaatactaggggaaaatttccctgaactacaaaacaaaacaaaacaaaaaacagtagtctcttggttgaatgaaaaagaacccatactactgagtgaaatttcagactatctggacaagtcacttagctatttaatcggttataccacgagatacttatggagggtattagaacaattaatgatagtttcattaaaaggtaagcaaacaactttgggaggccaaggcaggtggatcacgaggtgagttcaagaccagcctggccaagacggtgaaaccccatttctactaaaattagctgggtgcggttgcaggtgcctgtaatcccagctacttgggaggctgaggcaggagaatcacctgaacccgggtggcagaggttgcagggaggcgagatcgtgccactgcactccagcctgggcaacagagtgagactgtctcaaaaaaaaaa

SEQ ID NO: 59374 - DNA, 1958 bp, Homo Sapiens
atgtaagggagcataaatgaattcctgattactctgtaagctaagaatttaaacatatgttcaggattgtatttttataaaaatttttattgcaaattattaatatagattcacagatgaataaaaaatgatgtggtcctatttatgtaaagcaaaacaaatatttgataggtggtgtagaatgatgtttacacctgccttatggatgatttatgttggaactgctaggcctacgagtcagaatatctacttaccagaaaatcatagaaaaatatgcaagtttatatcactcacactgtggagaaaaccagtcagtaacaaactgttaagtcttaacagtgattataatattgaaaagaacaatatcaacagtagaacaaccatatcaagacagtggatcatgaagcaatgactataggattccctcctaaatttcgttcattgtaacacccacactgtgttctgtctctgtgcacagcacaacaaactcacttcaaagccaaatgaggacttggcatactcaggaaattctagtaatgagatgctcttagttttactgttacagtatgtagcacttcatcttaggcaaatatgacagtctgtggaatcctgtgtcattcatttgaaagaactgacaaaagaacatgtttttagatcaacttgcatttgcaggaacacacatgggttgccaaaaatatccatttagagtgtttaaaagaggcacacgcctggattggcctcggtgaccaataatgtctggtggtaatgcgtgttttttggagtagtctttaattactaaacaaggtggtgacatacataaagccagtgggttttttttccaccggaagatgggtgctaaagaaactgagcgattttatttttttcatcatataatatttctgatggtcttgcctccttcaagtctcaacatgtgtctctttaaagagaatatttcacctttcaaaatgaagtctcctaatgactcacttaaatgtttattgttttcttgccgtaaggaactttgtgacttgtaaatatgaatttatgtatgcatttttgtatgaataaatacatttataaaattgatatttaaaaagagctagcacttaagttaggccagacgtttttctaagcactttacagatgctaattttctaatcctttcaacagccctgaaaagtgactttcatatttaggattgaatataaactcattctaagattgtctataacctatttctgtgttgcttagcatagttctatttaagagaactaagacaaacatatagaaatatgatgatgacaatgatgatattatattactttcccaagtgtctggcactatgcgtatttcaccaagcatttgtagagaagcggcagaatatgatgattatgagcctcaattctggaatgagactaacctggttttaaatcctggctgtgcttcttacaggttgtgtgatttgtggtaagttacttaaattgtctgtgcttcagtttcttcatttgttaaatgtgtatgacacctatttcatagaattgttatacagattacgttaattactaaaaaattatttcgagctcttagaatagggactggcacatattcaatacaaaataagtaataaaatacagaggtatgtatttgaatattcaagacttcttggaaggaaaatacttaatgctgttgaggaaaattttaagcaattagaatggcaactagaagagattttgtaacaaactatagtggattatctcacatatttatccctcattcaggcaactacacatctgagttctctgcttgttactagagctcatggttgctggctccgaatgagaactgaatatgaaaattttcagtttgtgaaaaacatctggagcttttagttgactacaagcttaatatgagccaactgtatgttgcaactgcttaaaagagaaaaaaaaaaaaaaaaa

SEQ ID NO: 59375 - DNA, 1019 bp, Homo Sapiens
tcacaaatttcattttcacacttgtgggagtctggcttgttgagaaggtgggccgcagaaagcttacctttggtagtttagcaggtaccaccgtagcactcattattcttgccttgggatttgtgctatcagcccaagtttccccacgcatcacttttaagccaatagctccgtcaggtcagaacgccacttgcacaagatacagttactgtaatgaatgtatgttggatccagactgcggtttctgctacaagatgaacaaatcaactgtcattgactcctcctgtgttccagttaataaagcatctacaaatgaggcagcctggggcaggtatatcactcattttaccatacgaatatataataatatttcaaaacgaggcttatgtttaagttttcagagtgcttgcacttatagcagttcttttaaactggccttcataactacattactttgcagcatatactggtgatagtggatgcaaagcattgcaattgtgtgtttcacacagagtagaaagcactcaggcctagacttttggagacccagatttctctaataaggtataggagtttggatctttagttttaggcagctattcacaaatactgccaaggcaatttctcccactgcatattgtttaattgtactgtatttccaaactcccaagcttttaaatgaaagaaaactgtaaagtcaaaatgaattactatcacgttaggttgggcacagtgcatcacgactgtaatcccagcactttgggaggctgaggcaggcagatcacttgaggtcaggagttcgagaccaccctggccaacatggtgaaaccccacctctacaaaaatacaaaaattagctgagagtggtggcacatgcctgtaatcccagctgctcaggaggctgaggcaggagaatcacttgaacctgggagatagagattgcagtgagctgagatcaaaccactgcactccagcctagacaacagagcaagactctgcctcaaaaaaaaaaaaaaaaa

SEQ ID NO: 59376 - DNA, 1583 bp, Homo Sapiens
ctagaactcagaatcgaagtgtccactgtcatatgtcacatagtagacattagatagtagtaattgttaaactcttggagaacattgtagaattttaaaagctaaatgagaagttgatatgttatccagtgactgttactcaagttctgactataatggagtgaattttaaaaattaacagtttaaaaaaatagaaaaaaggaaatgtaacagaaaactgcagtattttaaaatatttctttatactgaagagatcagtgttagaagtgaggcctaaattatatgaagcagcaagtctgtctgattctgggcataattgccgaaagcaattcagaagaatcttcagattttgaatgtgaagaaagctttgacttaatgtttgtttatgatactaggggaaaatgatgaataaatgtatgcaattgtaggtgaataaaaagtatgcttttaaattatctattcattttggtaatgcttttgttaaatggaaggtggcacttacaactaaaggtttcttagaattgggggaatatggtatacttctctgagtgttatcaagttcaaatgttacaattcatatgaaagagcttagtacgataatggggaaaataatagtaacattgattataaaggcaacaaacttaatgattaagagtgaaagtcctggaatcagacttcttggattttaatcctgttaccaacacttaactaggtgtgtaactttgagtcagttactcagttaatgtcttattttcctcatttgttaaatgggtataatagtatgtgcctcaggttaaatgggcttaatgtgtaagtgcctagactagtacttggagtataggaaatgcttaatgagattcaatgtatgttatttgttatgaagctgtgaaacactgtgtatatgattttaaaatgtgctatttaaattcatcatttacagtttaacttgccattttaaaaagcaacatttgattactgattgaaaaaattttttggtctcatttgtgcagagcttatatttttctccttgcctaagctgttcttcatttgtttgtataaatattggcatgtttatttaccttggactagtccatgtcacctttcactaatcaaagctgttatttctgggttattaatcatcccacccaattgggtggcagcagtaaaccctgagggcttgccatctctcccactttataagttattactgtcattattgtttaaataattaaggagaggtttttttttgccaaattctttgctgtttggaaataaggaatggaacaagtaataaatatgctgaaaatatatgttttcttagttcactttaagaaattgatttatttaggaaatggtgtttgttttaaattacacttgatttttttgaaaaatttgtatgggcatatttcttaaaacgttaggtctatagtataaaaagaattaaaacaccaaagatttctattgatttatattctttggttattcttttatatttcttgactggtattctgtatggttcccaaaaccagtcaagaactgtaaaactcttactctacatacttgccagcaaaaaaaaaaaaaaa

SEQ ID NO: 59377 - DNA, 3532 bp, Homo Sapiens
tttttccttctgacaccttctactgtgttcttgccactccctcccatcacctgcatttcctttcttaggtttctccatcctgggcccatttgccacaggtcagaccagcacaggcccacgctagcacgttgcccaggggcctccttcccttgggtcaggcccacttctctttcttagtcagaagagccctccacaaagccctcagaagattaatgcatttttttttaatacttgagaggcatttggtaggttttacagatgcccagtgacaattgcaaaggttaatttactttgagcttaaatagctaccagcttcaagaaaagtttattggccactagttctccaattacattttatctttctttagattgatttttttttttattgtaaagaaactggcatgtttgttcatccatgtttggtctctctacctttaggatttaacttcataattcgctgagtcaaacaacgcaggcagagctaaatttatacagggtcaacttttagagagcccacagcagtatctggtaggtatcaaacctgaatttttgtgactctatttttctttgtttctaacttctctgtgtataatcctggtttctctgtaccttctcagttgctcctcctgcatccctcattaatacctttttcctaactatgtcccttaagatggagctcttgccttgcttttttctgacaaaatactttattagaaaagaccatccattcttataacaatagctgtaagcttttgggaagctaaaggctcccaaagttgtactctagcccagtcttctttcctgagcaagaatcctgtcttctaaaggccccggacccctcctcctcactgtttaggagacaccccaacacacccactccaggccatcacctttccctcactttttcccaactctgctggtggccttgacagccaccgagtcactcgaagttaaaagactgtgaaatcatagaacagtgaaaactcctccacacatgttctcatagcaaaaccatgacatggataaagcaggtattatcattcctagtttacagatgaagaaacagatgcagagagattaaattatcccaatcacaaagtaaatggcagatttttgctatttaaaactggccagggcgggggcagaaacaaacctaaataaacaacttgaatattcagtcaaatatttatggaatgattaaatacataatgacatttccacacagtgggatattattcagatgttaaggaaagttaatttgaagaacatttgatgatatagggaaatgttcacattataacattgtcaaagaaggctcaataatctgtgatccctgtttttctgtatgtacgtatatacataaatgtgcatacacacacacacacacacacacccctatacatctacccctttgtatatggagagggggagaaatctcccctcacagtcacacacgtaaacacttgagattttttgttaatgctcgagcaaaataaaccactctgtgatgagtgcataggtaattttaattgtcttctttgtagtcttccagatttgtcttcagtgagtacatgcagctttcagctggtaatttgcttttataaacaatagccaagtgagctgcagtgcctgttccccagctcatcctcctgcaggcttgtcccaggcccctccgtcctctcccttgaaatttgctcttccatcaattccctgtgttccagtcctctgtggcccccctcactggctccgcccagccccctgcctggggtgatccagccttctgccctgttcaccccctgccctagcctcagcccttgctttctctggtgcctccacccccatcaccacctcctgctctgagcccacctggcctagcctttgtgggcctccatgccatgaacagggtcagagcttgtaaatatgaggcctacagactggccaagggcactgcagcatcccagtctaaacgcacccgtgggtgagcctgtggactcagccatcttggctttcttgaaactcagcgtcgctgctgctcgctggctggcagggggtccacttggcagctctgacccacatgccctctgcaacccttcctctgtccttgacctctattccagatatgagtgacattcacttcccacattttcatttacctatactaattttgtgtttttattactttttaaattagagggggatacaacgacatttaaaagcctgttgtaacgggattgttagcttttaggaggtattggtctgccaccaccaccgtcagtccatcgttccaaaaaaatttattattgaggagtggtgtgatattaaatataatgtgaatctatttctgaaggaattagactgaaatttaattgaagattccttgtgcatcttgaagctaaaaataagagatcatacggtggccccagaatcccttactcccctctagcctcccaagcagaggtagcccagtcaggaggcttctagaaaaggaagtgcccaccatttagattcacatttaacagaatttttaacccagttttaaattagccccaatcacccttaatagttggtattccccatcagccaggattttgtctatctttatttactttcttggtttatattatgaaaaatgatttatccttactccttttcaggtataaaattatacagtcaggtgctgcataatgatattttggacgtgatagtagtccctaggcttacaatggagctaaaaattccttgcacctgatgatgttttgacgatcttgaccctttgtcggcagagactaatgtatgtgtttttcttagtttttaacaaaaaagtttaaaaagtaaaagaaaaaaattaatagaaaaaagcttatagaataaagatataaaggaaaaaataatttttgtacagctatacaatgtgcttgtgttttaagctaagtgttacaacaaaagtcaaaaagtttttaaaaatttaaagtttataaagtaaaaaagtttcagtaagctaagggtaatttatcactgaagaaagaaaaatgttttttataagattaatgtagcctaggtgtacagtgttgataaagtctatagtagtgtacagttatgtcctgggcctccacattcactctccactcattcactgactcacctggaacaacttccagtcctgcaagctctattcatgctaagtgccttagagaagtagaccattttttatcttttatactgcatttttactgtaccttatacatgtttagatatacaaataccattgtgttacaggtgcctacagtattcagtacagtaacatacggtacaagtttgtagcctaggagcaaaatgctgtaccatatagcctaggtggtagtgggcttgaccatctaggtttgtataagtacaccgtatgatgttcacccaatggcagaatcccctaatgcatttctgagaacgtagccccatcaagtcactcatgactctatgttgactatgctttttcacgcttccagaaaagtcccctcattaaaaaaaaaaaaaaaaa

SEQ ID NO: 59378 - DNA, 534 bp, Homo Sapiens
ttgaaggttcactgtatgttttaatcaggctcagactgaaataaaagtagtcaattgaaaccccaacctggaaagccatccctgctatggctgtgatttcatcatttcggcatcccgaaacattcacttagagcaacatccatgtaaacagttcgacatatggtcccctgctgtggatctgtggctagtaacagcctgggagcagcagacagacaggggacacttaaacctcagaaagcaatagcagcctctgacgccttgctcaaggcttctcatctggtggctcagtgagactttgggaggtggaagtggtgaaagtggaaagccatgaagacatagctgtctttgcactggaaaaagctcctccaactgactggccaacagcttttcctgtttgtacaacattccggctagttgtgaccatgacgtttccaatttttttgccacgttcactattctgaacagaatgtgagaaccttaacttcatgtctgatactgagtattggccttgaaatggatggctgtaaaaaaagc

SEQ ID NO: 59379 - DNA, 6480 bp, Homo Sapiens
aaacaaacaacatgaagttgaagaagccaccaacattctgacagcaacaagaaaatgtttccgacacatagccctcgattatgtgcttcagattaatgttcttcaatcaaaaaggagatcagaaatcctaaaatcaatgttgtcatttatgtatgcccatttggccttctttcatcaaggatatgatctgtttagtgaacttggaccctacatgaaggatcttggtgcacagttggatcgactggttgtggatgcagcaaaggagaaaagagaaatggagcaaaaacattccaccattcaacaaaaggatttctccagtgatgattctaagttagaatataacgtagatgctgcaaatggcatagttatggaaggatatctgttcaaacgagccagcaatgccttcaaaacttggaacaggcgctggttttcaatacagaataatcagttggtttaccagaaaaaatttaaggataatccgactgtggtagttgaagacctcaggctttgcacagtgaaacattgtgaagacatagagcgacgattctgctttgaggtggtctcgccaacaaaaagttgcatgctccaggcagattccgaaaagctgcgccaggcatggattaaggctgttcagaccagtattgctactgcttatagagagaagggtgatgaatcagagaagctggataagaaatcatctccatccacaggaagcctagattctggaaatgagtccaaagagaaattattgaaaggagaaagtgcgcttcagcgggtccagtgtatccctggcaatgccagctgttgtgactgtggcctggcagatccacggtgggccagcatcaacctgggcatcaccttgtgtatcgagtgctccggaattcaccggagccttggggttcatttttcaaaagtacgatctttaactttagacacctgggagccagaacttttaaagcttatgtgtgagttggggaatgatgttataaatcgagtttatgaagctaatgtggaaaaaatgggaataaagaaaccccaaccaggacaaagacaggagaaggaggcatatatcagagcaaaatatgtggagaggaaatttgtggataaatattctatatcattatcacctcctgagcagcaaaaaaagtttgtctctaaaagttctgaagaaaagaggctgagcatttctaaatttgggccaggggaccaagtcagagcatctgcccaaagttcagtcagaagtaatgacagtggaattcagcagagctctgatgatggaagagaatctttaccctccacggtgtcagccaatagtttatatgagcctgaaggagaaaggcaagattcttctatgtttcttgactcgaaacatcttaatccaggacttcagctttatagggcgtcatatgaaaaaaaccttcctaaaatggctgaggctttggctcatggtgcagacgtgaactgggccaattcagaggaaaacaaagcgacaccacttattcaggctgtattagggggctctttggtgacgtgtgagttcctcctacagaatggtgctaatgtcaaccaaagagatgtccaagggcggggaccattgcaccatgccaccgtcttagggcacacagggcaggtatgtttattcctaaaacgaggtgccaatcaacatgccactgatgaagaagggaaagaccctttgagcatagctgtggaagcagccaatgctgatatagtcaccttgttacgtttagcaagaatgaatgaagagatgcgggaatcagaaggactttatggacagccaggtgatgaaacttatcaggacatatttcgtgatttttcccaaatggcatccaataatccagagaaactaaatcgtttccagcaagattcacagaaattctgaatttttttaaaaatgggaaaatatgaaatctggtgaccccctaatgtatacagctaaaaattcacaatttttttactgctttaattctacttaattttggtagatattgaatggcttggaaaagaggtacccattcatatatttataaattaaaacatagttatctagtagtaggagaggaacctagtttaggacctcttttattaaaaaagcctatttaaagggctatttctgtagacagaagttcagtctagatttaggccatctctaggttacaagatgataggaggttagacaaaagtgattcttttgccaatgggtggtggcattgatttttttcctccatgcatcttgcccaggatcactcagtcaagcatgtcttcatcaagtggaagccaactgtcctgcctgcctcaagaatatgtgttttctttagcttccctgaggatttttggtggttcagaaataggtgtgtgtgttgatgtgtttttggtaacctagctttcatacacataatatatgatttattagaactagagaatgtgttttccccgtttgttcataaatgcggtcggttatacttcttaggtgacaggttattgtccagtactttaatgtatgtatgtataatggctgtacaggtagaccataattcagtcctttagatttattttatgcagcaaaaagaagctctttttttttttaatcacaaaaaaaaaccccagttcaaaatgtgtagttcttcattgttgggttgattccccaaaaccttgacagatgtatcgatggaataaaagtatgttttaaaggttacttgaatgtcacaaaattatgccttcatcaaaactttaaaggaaaaatcaatttataaaatcatgtaggccatttttatatttgaaatttgtccttttaaagatagttttgctgttgctcctagtgaaagaaaaatctctgtacaaaggagaaaaagaaccccacttattcttagttaatactaaaatatatagcaataaattgctgtttattttttctacatctattttgtgtacttgtacacagtgtacattcttttaaattatatcgtgtatatagctttagtattcggttacatgattcacagacccctgaattccaaaatattatggataaacattaccatttatatgctacaaattagtctgattccatctttgaaaatgtcttaaagtataaaataattaatttgctttttttttttttttcccgagatggcgtcttgctgtgtcacccaggctggagtgcagtggcacgatctcagctcactgcagcctcctcctcttgggttcaagcaattctcctgcctcagcctcccgagtagctgggactacaggcacccgccaccattccgagctaatttctatatttttagtaaagacgggtttcaccattttggccaggttggtctcgaactcctgacctcaggtgatcagcctgctttagcctcccagagtgctgggattacaggcgtgagccaccgcacccagcctaatttgccttttgattccttcccattgttgtcaaaaattaagtctattcttcttttagaaattatatgtaaatgatattattgatactctttctaaataagaggttttaaaatatataaaaactttatgatccaattatagataaattttctaacatttcccagtcactagggttttataagttgattaaacatcaaatcagaatctagccaagcaggaattatattgaaataagttcacattacagaaaaggttccataatttggccaaactgcatgcatgtaatgcttatttagtaatggtcactgtatgttagataaggataaaaatatatttgtgaattacttctgaggaaatgctaacttccacagcattgtatttaattataacaataacaggaacattaaatctttatctttgctgtttcacctcaaagtcatagatcatctggctttttaggcaccttcactaaaggcaaaaatctgatttgtagtttttattagcatgtaccttgaaattatttgaccaagaagctcaaagaaaagaagtacgttaaagaaaaagaaaaaacctcacttttcctttatagtgtcccttcctgttttaattcctaaagatcctgacttttatctgaggaagtctaggtagttttccttttggatctggccattggtgcgtgtttcattcagatcacctctggaatctctgtggttgtgaaggcaattccttatgagactcttgcctcctgtggcttacgtgatgaattgttaatatggcagtaattaattagtatctacttaaatttagtggtcagaaatgtatttgaagtgccttaaagatgatcatggttcagaatatcttcagagaaagcaaaatctttaatattgcagggagcctagcaatacaaatacacatttctgtggcttgatttcttgaatatgctgagacccaatttggactacatttggcagaaatcatggagtaaacagcaaggctttaaattaaattaatagttacaaggtaggttggctcttaggtgaatttagccatgtcaactaatagcttttatatggtatgtaacaaatctgaattatgttatgctgtgaattattcagtgcattataagaaatcttagttaatcatgcttttgggcttcattagtcaatgtgattggccttttattttctttccataacttatctgctattattagtttcttattccttattattaatctgttagctcattatcattagcttactaacttgaaagttagattaatatcaaaataagaatagcagcactatgaagagttaataaaatgcaatttcatgttagagctagaataaaagtaattgagcagtcatttgcaaatgcttcattataacatttatgtgcttaagatttctaaggttttaaaaagttacctttaatacaatccttagaaactcagaaatttcctgatattcattagattatggtgtttgcctaatttataccggttttcactgtatattttaatgaactttgattggttacttttccagacatacagatttaatttggaatatgaactttggttcttcatgagtgcattttgaaaaagaaaaaaagtacacattcagaatctggccaatttaagtttgtattttaaaaatattttatgcatgttaagtatggtcgcagtaaatgaaattgtgtttaagactaaatttactaccgttttgaacagacattcccagatcattcttatattgtcagataacacttgtgtataatatcactttggaccatggacatgagctggaaaaatgatgtatttttgtagattgtatgtccagaatgactttagaaccgcatgatacggtggaaggagcactggactagtcgtcactaccctttttggattcagggctcctcacaattaaaatgagtgtaatgaaacaaggtgaaaatatagaagcatccctttgtatactgttttgctacttacagtgtacttggcattgctttatctcactggattctcatggtaggatttctgagatcttaatctaagctccaaagttgtctacttttttgatcctagggtgctccttttgttttacagagcagggtcacttgatttgctagctggtggcagaattggcaccattacccaggtctgactgaccaccagtcagaggcactttatttgtatcatgaaatgatttgaaatcattgtaaagcagcgaagtctgataatgaatgccagctttccttgtgctttgataacaaagactccaaatattctggagaacctggataaaagtttgaagggctagattgggatttgaagacaaaattgtaggaaatcttacatttttgcaataacaaacattaatgaaagcaaaacattataaaagtaattttaattcaccacatacttatcaatttcttgatgcttccaaatgacatctacagatatggttttgtggacatctttttctgtttacataaatttatccacttaaaatgtgataatgtggagacaaagcaagatttgattacataaacttttctctgcattggtcttttcactatcttatttgctaacttttcttatttttcttcaacctccccaccctccattttttggatattaaacagggaaagcttgctacattataaagattgttggcaccatttattttacacaaaggctaaaggttaacttttggaaatgatgagctacttttatatatgtgtttactcatgctttgtgatatttctgggatcattccagtcataaagacttattacatgtactatttcttgctacctgtgaaaaggtatattttaaagaatgtataaccaacagtccatttactttttattagtatgtagaggatttgtatctaattcatgaatgtagttttacagtagtttgtcattgtaaatggagcaaagtacattatcttctaaaatgtacattatgtaagaattgtaaatatacttaagtaatttgtatgccaaaaaattacaataagtcaataaagatctcacctctggctt

SEQ ID NO: 59380 - DNA, 1191 bp, Homo Sapiens
caaggactctcatacgtcactgtggaatgcagaatattgcagcctcatggaagaggatttggcagcgtctaacaaaactacatggcatttgccctttgactcagcaattctagaatctgcctcaaaaaaactccagcaaagaaatgaaaggactttaggcacagagttcttttcacagcctgcatgtgtttgcaacaaagttcttcactgtggcgtttgtagatgtggggaaaagagagatcaggctggtactgtgtctgtgtagaaaaggaggacgtaagaaactccattttgatctgtaccccgagcgattgttttgccctgagatgctgttaatctgtaactttagccccagccttgagctcacagaaacctgtgttgtatggaatcaaggtttcagggatctagggctgtgcaggacgtgccttgttaagaaaatgcttacaggcagtacgcttggtaaaagttatcgccattctccattctcgataaaccaggggcacaatgcactgcggaaagccgcagggacctctgcccaggaaagccgggtaccatccaaggtttctccccactgagatatggccttgtgggatgggaaagacctgaccatccaccagcccgacacccgtgaaggatctgtgctgagtaggattagtaaaagaggaaggcctctgtctcctgccttcccctgggaacggaatgtctcagtataaaactgatcgtacatttgttcaattctgagataggagaaaaaccaccctgtggtgggaggcgagacatgttggccgcaatgctgctgttactctttactccactgaaatgtttgggtggagagaagcataaatctggcctacgtgcacatctagacatagtaccttcccttgaacttacttgtgacacagattcctttgctcacatgttttcttgctgaccttctccccactgtcaccctgttctcctgccacattcctcttgctgagatagtgaaaatagtaatcaataaatactgagggaactcagagaccggtgccagtgcgggtcctctgtatgctgagcgccagtcccctgggcccacttttctttctctaaaaaaaaaaaaaaaaaaaaaaaaaaaaaaaaaaaaaaaaaaaaaaaaaaaaaaaaaaaaaaaaaaaaaaaaaaaaaaaaaaaaaaaaaaaaaaaaaaaaaaaa

SEQ ID NO: 59381 - DNA, 2140 bp, Homo Sapiens
tttattagtgtctgtaagacctaatgaagctgaggaaggaaacatgatatggcttcctgaattttgtggttttgcagcagtaaggttatgtgagggcttccaccctaaaggacacccttaagcacagcacttaccaatttcctaagaaaaacatcttaagcaattcttaaaagacctgggaagcaggcatatttgctgaacgagtgtcccagtcattttaaagccagtctcatatggcatgcacatcagttgctttgtctgggatgttccacttggcatttatagagggagttgggtagtcccccttctcaggggagccttttatctagtccaccagcctggctgtttgctcaggaataaccacctttgtctggatcatgtatagccatgtgattgttccattgtgagccatgcattctgcatccaccaaaactttttcttcattttgcagcattatacagaagcttatgcatgcagccgtcataggtttattgcctcatgtccacagcaagtcaatatgcacagacactgggttgcagtagagaaagaggtttatttgtagggccactagatgacgagacatgaggaaacctcaaatctgactccctaagggatttgtggggttagggcgtttaaaggttttgaagtgggccaaagtgtagatatcattcattggttagagtgcagggtgaagtcatgggacaggttgaagaagaagctgtattttcatgctgattctgttcctctctgggggtcttcaaactggttagcatcagctgttctgctggaatttgacatctgaaaaacatccgaagcaattcttaaaagccttatggttctaaggtcagaaattttatctacaggaaaatagggatgcaaattttcggtgtctactgctacatgactttcggttacaaggaagtaggtctaagttcagcttcattaatacttaattataactatctttctgcccagaattcttgttaaccctgtgaggacagcttcatataccctaaattcagaatctgtcttagtaatggcttttcaggaagttgataccaatgtaaccgcccaacgggttcaccttgtcctccgcctagacaaagctgatttatcaagatgggaattgcaatggagaaagagtaattcacacagagctggctgtgtgggagactggagttctattattactcaaatcaatttccccatattcggggatcagagttttaaagataatttggcaggtaggggcttgggaagtggggagtgctgattggtcaggttggagatggaaacactgggggttgaagtgagatgttcttgttgtcttctgttcctgggtgggatggcagaactggttgagtcagattatgggactgggtagtgtcagctgatccattgactgcagggtctgcaaaatatctcaactactgatcttagtactgttatccccaggagcaatttggggaggttcaaactcttggagccaaaagctgcatgacccctaagccatcatttctaatcttgtagctaatttgttagtcctgcaaaggcagactggtccccagacaagaagggagtcttttcaggaaagggctattatcagttttgtttcagagtcaaaccataaactgaattccttgccaaggttagttccagcctacttccaggactgagcaaggacagctgaaaggttagaagcaagatggagtcagtcaagtctgatctctttcactgtcataatttcctcagttacagtttttgcaaaggtggtttcagtccttccctttgggtttaacagcaccttattcttaaggtgtgggctatgaagttgggaaagggccgtcagtcactctggctgctttctcctaactgggcgtagtgggggaaggtgttgaccacaaagtgagaggagtggaactgctttgcagctgtctgagtgtactcacgcaagccaggctgaggttccaaggcttcatgacaaaggtgttagtattctcatctatggttttagtacagcatttaagtggacatttaaatactgagttctaggataaggagtgcaaattccagttaagcattaatttggggcattgtggctcaccaaaatctaaattgcagaggaaaaaaaaaaaaaaaa

SEQ ID NO: 59382 - DNA, 1755 bp, Homo Sapiens
tttttttttttttttttggaatgtactttgagaataacagcatttcaggactggttttgtttaaagtatacccagcccccctccttattttatttgatttttggtttaaataaaaatgtagcaaagcactctttgaagtaaaagtacctgtcttttcttttttctttttttaaatcatagtttgttttacctgaaagttgagaaagaatgcagtataaatatagcttttctctacacgggagcagggggaacagaaccaatccccagcttagccacacccaacatcatggaaattactgtgaacctgttgtctcttgaggacaactaaaaccaaaacgaaatccctaacattattaaaatgttaggaaacttttcaggtaattgctgtaactctggtaaaatacagaaagattacattcactcataataaaaatcaagtgtgcccacgccatctgcaaagggaacttgcaccatcttggtttcactcgcattgttaacagtgccctaaaagtatacacctttttcaggataaaaccattaggtaatatcttgatcatatcctctgcatgatgaactatcactcaaattattctgtcatgggttaccttactaacactgacaaagagataataaatgataattttaacagggataggagaaaccttgcaaacctttcaagtttctttcataactattgttttattattgcatatttttagaggtattatcatcaacctgatcctttataggccaatatagtaacaaatgctaatttaactgcccagctcatttttattgtcagtctagcctcagcaagtataaaactgacaagacattcctctatgagagtgaccctcttagtgagagagaaatctatgtaccatcagaggaaataaatcttagtattcggtgtgatagagactaattcatttcttttgatgaagtcccactctttgagtgactttgaagggggagacaaaatgtcaagaaggagtcctgcaggaacaagtgcttaagatggtgtttaatacagcagggagccaagatacagtagtaggacacagtaaagaatgtggagtgtgtagatacaataaagaattcattttatgatctgccacctgttacttgaaagaggagtaagttagggaaataaatgactcagttcttcatacatgcaaaggtaagttagttattacaaaagtttttgctgttgtttgtgctgaaagaaaagcatatgcatttaaacattttttaaaaaataaatcactcaataggcttaagaaaaatactttagttcatagttcattgatctgacgttttgatttaagatcaggggatgaatccaggatgaaaaccaaagaaaaaaaaagaaaaagaaagaaaaatatagaagtgaatcatttaccatgaaaaaggcatttccagcctcagctaacctcaactagtttttattgcattatttttgaaatgccaagaaactggctttggccataatacttgctgtccaacaaaatcacagctgttaatatgcaattgcttgcaacaattagctaaacagcattatttgacaaattcccttgaaagagacatagatgctatttaagtgtctagcacactgaatcaagtaactatcagttaggctggggattggttctgttccccctgctcccgtgtagagaaaagctatatttatactgcattcttcctcaactttcaggtaaaacaaactatgatttaaaaaaaaaaaaaaaaaaa

SEQ ID NO: 59383 - DNA, 304 bp, Homo Sapiens
cagccaccctcagtgtccgtgtccccaggacagacagccagcttcacctgctctggagataaattgggaaataaatatgcttcctggtatcaacagagaccaggccagtcccctgtactggtcatctatcaagatgccaagcggccctcagggatccctgaccgattctctggctccacctctggaaacacagccactctgaccatcagcgggacccaggctatggatgaggctgactattactgtcaggcgtgggacaacacccatgtgatattcggcggagggaccaagctgaccgtcctag

SEQ ID NO: 59384 - DNA, 532 bp, Homo Sapiens
tgtaaacatagtttttattcttatcttaccttcaatgaaattttgtcctcatgccaccaaaacatttttgaaactcagtaactgaacaccaaactcagtagcctcatgattacttttctagacaattgctgaattatattgctttaaaaaaatagctgagatatatttttattactttattcctttttaaagcagcaatatcccctcacatttttttcataaaaatctaaaatatctctagtagtcccaagtgtctcatatttatatttgttctaagcgtttgtttcattaagatttttcagaaataagtgcacttctaaagagaaagtaaatttaaataaacacaacaggaaaataatcatgggttgtagcaaacagttattttgaatgttctgaattttaacaattcaaaggagaatgtgtttggtagccagggacctctatggactaaattctcaattcatttatttgtagatcagcaaaagacagatagctgctgctcctgtcagtaaagactgactgattgattgtc

SEQ ID NO: 59385 - DNA, 5956 bp, Homo Sapiens
caaagctcttgactcgctagctcagccccaacgcctgcatgaacttccggctacacgccattccgcttcccgaggaacgcttgggctgttgtacgggttccctacgggactctgaagactgaggatatccggcccggagcgtttgtgcggcgcggagttaagcgccccggcagtaacttaagggaagtggaccagggttgccgctgcccagagcggtcctttagtttccactggagtggagggaagagtgctgccatggcagcccctgcgcagcccaagaagatcgtggcccctacggtgtcccaaatcaatgcggagttcgtgacccagttagcatgtaaatactgggctccccacatcaagaagaaatcaccttttgatataaaggttattgaagatatatatgaaaaagagattgtcaaatcaaggtttgctattagaaagataatgctcttggaatttagccagtatcttgaaaattatctctggatgaattattctcctgaggtatctagcaaggcctatttaatgtcaatctgctgtatggtgaatgagaagtttagagaaaacgtgcctgcatgggagatttttaagaagaagccagaccacttcccattcttttttaaacacatcttgaaggcggcattagctgaaactgatggtgaattttcacttcatgaacagacagtcttactactttttcttgatcattgcttcaatagtttggaagtagacttgatacgaagtcaagtacagcagcttatctccctcccaatgtggatgggcttacagctggcacgattggaattagaattaaaaaagacacctaagctaagaaaattctggaacttgattaaaaagaatgatgaaaagatggatccagaagcaagagaacaggcatatcaagagaggagatttctttcacaactcatccagaagtttatctctgtgctgaaatcagtcccactttctgaacctgtcactatggacaaagttcattactgtgaaagattcattgaacttatgattgatctagaggccctgctacccacaaggcgctggtttaataccatcctggatgattcccaccttctggttcactgttacctttccaatcttgttcgtagagaagaggatggccatcttttttcccagcttttggacatgcttaaattctatactggttttgaaattaatgaccaaactggaaatgctctgacagagaatgagatgaccacaattcactatgatagaattacttctctacagagagctgcttttgcacattttcctgaactctatgattttgccctctcaaatgtggcagaagtagatactcgggagtccttggtcaagttttttggacctcttagttcaaacacactccaccaggtggcatcatacctctgcttgttgccaactcttcctaaaaatgaagacacaacttttgataaagaatttcttctagaattgctggtatctcgtcatgaacgtcgaatttctcagattcagcagttgaaccagatgcctttgtatccaactgagaaaattatatgggatgaaaatattgtcccaactgagtactattctggagaaggttgtcttgctcttcccaaattgaatttgcagtttttgactcttcatgactacctgctaaggaactttaacctcttccgcttagaatcaacttatgaaattcgtcaggacattgaagatagtgtcagcagaatgaagccatggcaatctgaatatggcggtgtagtgtttggtggttgggcgcgaatggcccagcccattgtggctttcactgtcgttgaagtggccaaacccaacataggtgaaaactggccaacccgagttcgtgcagatgttaccataaatctcaatgtcagagatcacatcaaagatgaatgggaaggtcttcgtaagcatgatgtatgctttttaattaccgtacgtcccacaaaaccttatggcactaagtttgaccggaggagaccttttattgagcaggttggcctggtttatgtcagaggctgtgaaattcagggcatgctggatgataaaggacgtgtcattgaagatggacctgaacccagacccaatcttagaggagaatcaaggacatttagagtgtttttggatccaaaccagtatcaacaagatatgaccaatactatacaaaatggagcagaggatgtgtatgaaacttttaatataataatgaggagaaaaccaaaggaaaataactttaaggctgtgctggagactattcggaacctgatgaatactgattgtgtggtacctgactggctgcacgatatcattttaggttatggggacccaagtagtgcacattattcgaaaatgcccaatcagattgccacccttgatttcaatgatacatttctctccattgagcatttaaaagccagcttccctggtcataatgttaaagtaactgtagaagaccctgctctacaaataccccctttcaggataacttttccagtaagaagtggaaaagggaagaaaaggaaagatgcggatgtggaagatgaagacaccgaggaagcaaaaaccttaattgttgagccccatgttattcctaataggggtccttatccttataatcaacccaaacgtaatacgattcagttcactcatacacagatagaagccatccgtgctggaatgcagcctgggctgactatggttgtgggcccacctggtacaggcaaaacagatgtggcagttcagatcatatccaacatctaccacaacttcccagaacagaggactctaattgttactcattccaatcaggccctaaaccagttgtttgagaaaatcatggcattagacattgatgagcgccacctactgcgtcttggtcatggagaagaagagctggagacagagaaagatttcagcaggtatggaagagttaattatgttctggctcgaagaatagaacttttagaagaagtcaaacgattgcaaaagagtctaggggttccaggagatgcctcatatacctgtgaaactgcaggctatttcttcttataccaggtaatgtctcgctgggaagagtatatcagcaaagtgaaaaataaaggtagtacattgccagatgttacggaagtctccactttcttccctttccatgaatactttgcaaatgctcctcaacccatttttaaaggaagatcttatgaagaagacatggaaattgctgaaggatgtttcaggcatattaagaaaatctttacgcagcttgaggaattcagagcctctgaattgcttcgaagtggactggacagatctaaataccttttagtgaaagaagccaaaattattgctatgacctgtactcatgctgccttaaaacgacatgacttggtcaagctaggtttcaagtatgacaacattttgatggaagaggctgctcagattctggagatagaaacttttatccctcttcttctacagaatcctcaggatggatttagccgactaaaacgatggattatgattggcgatcatcaccagttacctccagttattaagaacatggcctttcaaaagtactcaaacatggagcagtctctcttcactcgctttgttcgcgttggagttccgactgttgaccttgatgctcaagggagagccagagcaagcttgtgcaacctctacaactggcgatacaagaatctaggaaacttaccccatgtgcagctcttgccagagtttagtacagcaaatgctggcttactgtatgacttccagctcattaatgttgaagattttcaaggagtgggagaatctgaacctaatccttacttctatcagaatcttggagaggcagaatatgtagtagcactttttatgtacatgtgtttacttggttaccctgctgacaaaatcagtattctaacaacatataatggccaaaagcatcttattcgcgacatcatcaatagacgatgtggaaacaatccattgattggaagaccaaacaaggtgacaactgttgatagatttcaaggtcaacagaatgactatattcttctttctctggtacgaaccagggcagtgggccatctgagggatgtccgtcgcttggtagtggccatgtctagagccagacttggactttatatcttcgccagagtatccctcttccaaaactgttttgaactgactccagctttcagtcagctcacagctcgcccccttcatttgcatataattccaacagaacctttcccaactactagaaagaatggagagagaccatctcatgaagtacaaataataaaaaatatgccccagatggcaaactttgtatacaacatgtacatgcatttgatacagactacacatcattatcatcagactttattacaactaccacctgctatggtagaagagggtgaggaagttcaaaatcaagaaacagaattggaaacagaagaagaggccatgactgttcaagctgacatcatacccagtccaacagacaccagctgccgtcaagaaactccagcctttcaaactgacaccacccccagtgagacaggagccacttccactccagaagccatccctgctttatctgagaccacccctactgtggtaggagctgtatctgcaccggcagaagctaacacacctcaggatgccacatctgccccagaagagaccaagtagccaaactgtagtccttctaaaggaggacatggcagtcaaaaagtctgagtaaagctgttttttgtattttatatttgcttctgccattttactgtcactaattaatgtttagttcttatatttgttaactgatttcggtgtcttgaatatatttttttaaattatgtgtatgaacaattctagtttcatttgttcaatcagaagagcaaataaccattcctttcatgttttgatcactgagtgtgtctgtaatcatacctacattaaaatcattttctatgaatatataatatatacttcacatttttagtgaacttctctaaagaagaggacagaatatactggacttaaccacgaatacccttgagtgtccaaattgggaaggaacttgtttcttctgttatactatcaaatgcttaaattctgtttccttttttcttacctttgtttgctgtctttatgtaaagatattattagcagtaagatacaggtttcttcaatctatcaaagtggttacatgcatttccttctctcaaatcttagaatgccttagaatcacctaagatgtctgtttattcttgaggcacacctcagactgaatgagtcagaatctcaggattagagcctaggaatctatattttaggaggttctccacaccactaatgtttgggttgctggcagagtggcatcagccaaggctggttaggctgagccaggatttgtcatcagctaaataggaggactctgccaaatcaatctgggcaagaagcaggatcctgagtctgggcaatgagagtcagagaacttaactcctgtgtgcagggtagaattttcccatggcagaaattctgagttttctgccttatttttcttgggataaccagccacagggagaccttcaggtaaaatgtggttcaaatatgggaaggcagaggtacctgggaccttgctactcaagtatgatttgtgaaccaacagcatcaacatcgtattgaagtttgttatttatagaaatgcagaagtttgggctctgctccaaacctattaaatctaaatctacattgcaacaaagtccccaggtgattcacaggcactttgtagtttgagaagcactgtactaagattactgtgttgtcttcacatgaatgaggctataatgtagaattaccagtgaatgtgactaatgttttctgacaagggacctctgcttacaaggtccctgggcatggtgcccagaactgg

SEQ ID NO: 59386 - DNA, 737 bp, Homo Sapiens
ttttcccactagaagctctgctctgctctcctggcccaagtaggggattccatgccttccctttcatggtcttagcaccagcagcctagtttctcccttccagagtctccagggatgacaaattggattggagacaaacctcgtcagatgctcatcccctaaaaggttaattgtgtatttgtggctgcgtgtgcctttgtgttttcattctcttcccatttttgtacattttggtcttctctgtggttttatacttggtcaaaagtactcgtcttggtattgcactgttgcgtgcatgagaaaactgggggaaggctcactggtacaagaaaggacccctgacccctttccttctctgtggtccccggcattagattgggggttctgggagaggcaggtgaatgtcctaagtgaattgttctgcttgtaactggaatgtttttgaagtctttggtgttgctccgtgaaaggacatcgccacctggtgctcatgaagtgtctctgcagaacactaaatggcaaatgaacaaccacaaaaacaaaaaacttctcccatttctaaacaaaaaaaaaactcgagactaggggggggcccggtacccaatcggcctatagtgagtcgtatacaattcactggccgccgttttacaccgtcgtgactgtgacagttggcgaattaccgataaaggcccgaccgtacggccctttcaaaccagtgcgcagcctgaatggggaat

SEQ ID NO: 59387 - DNA, 1309 bp, Homo Sapiens
cggagatcacagagcaatattattctctggatttattgggtttgctgcattctgttagcatcattcatattcttctcccatgggtaccactttcctctcttttcctaataccaagatatggagactcatttatgccgtggagtgtgatgctgggaaatgaatgcttgcttattacctctctccacaggacctttcatgaccatacgtcgatgtctgccgcctcagtataaataggcacattcagaaatgtgttctctagtgaaggacatgttggcttggtggaaagcacagggacttcacgtctggactgcgagtcagagctgtgcgtcatgtgcttactggctgtgtgaccttggataaatttgcctcagttttctcatttgtaaaacagacagtcgctatttctgggaatagatgagataataaggaaagaacctagaatggtacctggctcctgccagttgcacagaatgtttgttttgcagtgtgatgcgtccagtagggacacttaggggacagtgtactgtcatgctgttgccctgttttgtaagagtgactgatggctacgtgacatcaccacactccctgcaagagctgcggtgtatggcacgtggctaagctgtaggtgcacatggccttcaactccacctaagctccagccttctttttgggagaactggcctctgggtccacctatgaagcaggaaggttgattattacttaaacccatagtcttataacctcttgggaaaagattctctcaaaatgactcttgatggtcaacatgggtgtgcatttacgcagctttcattcccatcgcttcttgcaggcagtgttgttcctgattgccccagtctagtttatcgcaagggaatttctttgcggggcagtgagctcccttttggcagaagaaagagtcaagcagaggctgggaggttcccttacccacagtggtggctggctctgtagtgcctcccggctctgggttctactttcctagtctcctgcctttccgcaagtgtctccacccagctccgatagagtgggtagcatcaggagaagggagggcagggatgagtgttgtagcatctcaacatttaagagcagaggacggggggctggggaagagcatacactggggccggtgtgaggagggagaacattagaaaaaaaaagctaatgcctgctgggcttaatacgtaggtaatgggttgataggtaaatgtgtgccatggtggtttgctgcacctatgtaataaacctgcacatcctgcacatgtacctcagaacttaaaaaaaaaaaaaaaaa

SEQ ID NO: 59388 - DNA, 960 bp, Homo Sapiens
tttkatcttagtactttagaggtctcagagacaaaggctttggaagaaaggcgtgggcattcctgaggctttactttccccggaaaattactgcaccataatttgtgagtttatttcttccaactaagaaatagaggcaagaaagagggagtaacccgaagtgaagggctctaggatccagggaccaccagccagctcaagttggatttcagcagtcggggctgcctggbgbgtgcdaaakctgctgtgtgakctaaaygctgccgtgawgwcattccaggtkgcttccdggkkgkkgctgtatgtggtgatacgcatgtkgwcaggkagtytggbtggkcacctctcaagactggtgtttcbtagagctttccattggsaaatgctgcctcctggractgagggacaaaggttttgaaataagcccaaagtgatcaaaattactgagcagttctctctccctctgaggccctccaaggaggccctctggagcttggccagttcctctggggctggagcagcttgcagccagtttttgcaactgcaaaggccaggacttgctcccacgggctgcaggcatctctgcttccttggcatccctttgctcttttggccatttcatttccatcccatctggggctgtacggataatttttttgggcctgggagtaaagcgtgtccactgttggtaaagtgataaacggactgaaatgtgagagttggctggtctcgagggaaaaacagaggcaggtcaatgtgtacaagaaaacaaaaatctttccacatcagcagcagagtgagttttgtaaagccttctgcatcatattccacgacacctgtgccaaagtgactgagaaaagcagcaatatactctcttcttttgtgataccyttgaatcacgtactgcaccttgttgggtgagcaggtggcatacttgaggaacgtaatcaatgagacatc

SEQ ID NO: 59389 - DNA, 1898 bp, Homo Sapiens
acaaaattactttatcaaaaacaaattagctagaaaaaaaattacatcttatgttttcttatatagataaagagaggcctgtccagtctttgaaaacatcaagagatacttcaccctcaagtggttcagcagtttcttcatcaaaggtgttagacaaacccagtaggctaactgaaaaggaacttgctgaggctgcaagcaagtgggctgctgaaaagctagagaaatcagatgaaagtaacttgcctgaaatttctgagtatgaggcgggatccacagcaccattgtttactgaccagccagaggaacctgagtcaaacacaacacatgggatagaattatttgaagatagtcagctaaccactcgctctaaagcaatagcatcaaaaaccaaagagattgaacaggtgagagtctagttgtcttcatgtacataatttttgtttgtgttgctttgcacatgtaaacatttattgaataaatatgcttcatttctttttccacctgtaactctaaaactacaacttaaaaaattataaaaattgtttgagttgacttcacagtcagtttgatcagtatggtcccccacctggattgtttatttttaaataaaaaacagacttcttttttacagaatattaatattctagttagtatgaagcaattaaaaattattaaagttaatagggatgggatggaagaaatgttcaatgtagcaaaatgttagcaaatgttatttttgaatattgggattacagatgtttcttatgttttttcattatactttaaggtagtttccaaatattaaaggaaaaataaaggatactatttaagtctagttttttagtgaagtcattctgaaaagcaggactttgtttttaatgtgcaactattatggggttattttcattttatgaggattaaatgaagtaaatgtgaaagggttttataaaatgtaacattttgtacaggtgcttattgatgttgttactctctagtgcgttgaataaatgtaattacattgataataatattctaaaacctattggaaattaagaacaaagtgaaaacttttctctaggtgctgtccgatttctacatcaattaaatccgtttccttttgttggatagggaatggtctcaaatcctagatgtgaccgtgtagcttatgttaatgtcacactaatgtgaaaagataagaaccagaataggaaatttgtcatgcaaaccattggagtttcaaaatgaaggtggtgagcagtatcagatgcttagaggaatataaggaaaatggagactgagaaaattctgtttaatttggtgattgggaggcagttggtacctttcaagataccaattaaatgagagcataagtaaaaggtttgctcagtatatctatctttaacacaaagatgaatgtctttattttatataaaattactgtccttttttttcttgacatgtttttatttccttttctccccttaccataatggatgctctgtgaaaacaagggctttgttttatcttgttttatttactgctacatctgccatcaccgagagcagtatgtgtagcaggcttacaagaaatacttgtggccgggcgcggtggctcacgcctgtaatcccagcactttgggaggccgaggcgggcggatcacgaggtcaggagatcgagaccatcccggctaaaacggtgaaaccccgtctctactaaaaatacaaaaaattagccgggcgtagtggcgggcacctgtagtcccagctacttgggaggctgaggcaggagaatggcgtgaacccgggaggcggagcttgcagtgagccgagatcccgccactgcactccagcctgggcgacagagcgagactccgtctcaaaaaaaaaaaaaaaaaa

SEQ ID NO: 59390 - DNA, 2693 bp, Homo Sapiens
ctaagtatcagaaacttctaaaggaaagacaacagctacctgtatttaaacatcgggactcaattgttgaaactcttaaaaggcatcgggtagtggttgtggcaggtgaaacagggagtggtaaaagtactcaggtaccacattttctattggaagatttgcttctaaatgagtgggaagcaagtaaatgtaacattgtctgtacccaaccccgaagaatctcagcagttagtttagccaacagagtatgtgatgaattgggctgtgaaaatggacctggaggaaggaattccttgtgtggatatcagatccggatggaatctcgagcttgtgaatctaccaggttactctattgtacaacaggggttttgctaaggaaacttcaagaagatggtcttctaagtaatgtgtctcatgttattgtagatgaggttcatgaaagaagtgtccagtcagacttcctactaattatcttgaaggaaattttacagaaacgttctgatctacacttgattctaatgagtgccactgtggacagcgaaaaattttctacatatttcacacactgccccattctcagaatttcaggaagaagttatcctgttgaggtttttcatcttgaagatataatagaagaaacaggctttgtactggaaaaagactcagaatattgtcagaaatttctggaagaggaagaagaagtaaccattaatgttacaagcaaagcagggggaataaaaaaatatcaggaatacatcccagttcagactggagcacatgctgatttaaatccattttaccaaaagtacagcagccgcactcagcatgctattctatacatgaatcctcataaaatcaacctggatctcattttggaacttcttgcatacttagataaaagtccccaattcagaaatattgaaggagcagtattgatctttttaccaggacttgctcatattcagcagttgtatgatcttctatcaaatgatagaagattttattctgaacgatataaagtgatagctctgcattctattctttcaacccaagatcaagctgcagcattcacacttccccctccaggagtcaggaagattgttttagcaaccaatattgcagagacgggtatcactattcctgatgttgtatttgtaattgatactggaagaacaaaagaaaataagtaccatgaaagcagtcagatgagttctttggtggagacgtttgtcagtaaagccagtgctttgcagcgccagggaagagctgggcgggtcagagatggcttctgtttccgaatgtacacaagagaaagatttgaaggctttatggattattctgttcctgaaatcttacgtgtacctttggaggaattatgccttcatattatgaaatgtaatcttggttctcctgaagatttcctctccaaagccttagatcctcctcagctccaagtgatcagcaatgcaatgaatttgctccgaaaaattggagcttgtgaattaaatgagcctaaactgactccgttgggccaacaccttgcagctttacctgtgaatgtcaagattggcaagatgcttatttttggtgccatatttggctgccttgacccagtggcaacactagctgcagttatgacagagaagtctccttttaccacaccaattggtcgaaaagatgaagcagatcttgcaaaatcagctttggccatggcggattcagaccacctgacgatctacaatgcatatctaggatggaagaaagcacgacaagaaggaggttatcgttctgaaatcacatactgccggaggaactttcttaatagaacatcactgttaaccctagaggatgtaaagcaggagttaataaagttggttaaggcagcaggattttcatcttccacaacttctaccagctgggaaggaaacagagcctcacagaccctctcattccaagaaattgcccttcttaaagctgtactggtggctggactgtatgacaatgtggggaagataatctatacaaagtcagtggatgttacagaaaaattggcttgcattgtggagacggcccaaggcaaagcacaagtacacccatcctcagtaaatcgagatttgcaaactcatggatggctcttataccaggagaagataaggtatgccagagtgtatttgagagaaactaccctaataaccccttttccagttttactttttggtggtgatatagaagttcagcaccgagaacgtcttctttctattgatggctggatctattttcaggcccctgtaaagatagctgtcattttcaagcagctgagagttctcattgattcagttttaagaaaaaagcttgaaaatccaaagatgtcccttgaaaatgacaagattctgcagatcattacggaattgataaaaacagagaataactgaaactgaaattcatggtcaactgctttaaaaattaagatgaagatacagtcatgaaattatctgaaaatgggtcatcacattaagtatttcattacttaaaatgttggtactagccattaacttaaaggtggtgggaaaaaagcacatactttaaacatgtataattttctagttcctttttaatgatgattattctgaatgtatttgccactacatttacaataaattctttggtattatgcaaaaaaaaaaaaaaaaaaa

SEQ ID NO: 59391 - DNA, 4896 bp, Homo Sapiens
aggctccactcagctgctgtggaagaataaaggggattcggatgtctgtcctctcatgctcctcgaagctgatgatgcttgatgccattcttggccttttttgcttttattttttgtagttcttaaggggtttaaaaaatcgtggcataaggtaatgcaaaaaggtgtccatgtgttaaacgtacaactagacggactctgcagtgtgcccacctgtcctgctgctggaggccatttgaggagccagctgcctctcacagctatggactgcagcctatgcatgcctatttcctagtgacctggtgtgaacatggtggagtggggggacaagctcctgatgctcctttcctgtctctgcagcttgtgtttgaccaccagccaggtgacatctttggctgtgtggccgacatcggttggattacaggacacagctacgtggtgtatgggcctctctgcaatggtgccaccagcgtcctttttgagagcaccccagtttatcccaatgctggtaaggatggtgaaccctgtttgggaccccatgctggtgtcaggggagagagcctgaggctcgaggcttgtggagaggttcatggaagggggacgcctgggttctggtgagggtgtggctctccaggtcctgctgtcgaaatgcccggtggggccaggccccaggtcttcagaaagatctgacaggcagcagcagggagtctgacttggtgctggaggacatctcaaggcccctgctcctgcactcctgccctctgacttaaactgccggcctcaggccatcgctttggcatccttctcacctctaggctgcttgcccagatccagccctttctcaaagccagggccagctgcccgccacttctgtgtccccagccctgcccctgagccttcagggctgtccctcaaaccatgttaggcatggcctagaaccatctccattaaattgagatcactttgaagacaaggtgatgactggctcccttgggcatcgtcctcccacacagcacagtgtcttcaaatattttctttaatgtaagcagatcatggtggctctgcccaaaggctgctgctccagtgttccatggcactgacaactgtgcatggactgtgttatcacctcccagtgctccatccctgcctttgggggctgggtgtgctcaaggaagaagttgtaggggcaagaccagggattaagggccatggcccaggtgctgtctcaggccaccacttcagcccttagaagctcagtgttccatgtggaggggatggtgtgggtagtgggtttacaggaaccaggggtgtgcatgccgggcacatggccctgctccctgggacacacgcagtggcagctgtactgtcaccaggggaagcaccagtcaccactttagagcccatgtgagtgtgatcgagtgaaagctctgtgttaatgctccatgggttattaaatccacgtagtatcaccttgaactaggccatcaccctaagcctggtgaagactgttcctgaatgtgccgcccatggatctggggagtgcttggaggagagcggccattggggacctgtcccatggggcttctttccatctttcactggcgggggtggggggttggggggatccctttcatatggacatatgcgcgtctgcacatgcccagcactcaggaagtcttggctgatctctgagtttaaagtaaaccatgtcagctctcctgctgacagtgaatttcggcctttctgtaggtcggtactgggagacagtagagaggttgaagatcaatcagttctatggcgccccaacggctgtccggctgttgctgaaatacggtgatgcctgggtgaagaagtatgatcgctcctccctgcggaccctggggtcaggtgagcggcctgccctgcagcaggagaggttgtgcttgccctagaccctcagagccaatacgggcttcagcaggacttcagtcatgaagctgcccggctttgtatgtgtgaattcacgcaatgccagaccggatctggtagaaagcaccagcacctcttcccacctgtaagctcctccccagagctggcagcagttacctgtctggggaacaacgttccagacattttctgtgccgttgtttctgtgcccaatttctgtagcttaatcttcattaggaatacttacccactcaataagttaagggtcaggtcagttctttactggctgcatgggatttaactgtataacttagctgggtgtggtggcaaaggctgaggtgggaggattgcttgagcccaggagtttcaggctgcagtgaactaggattgcaccactgcgctccagcctggtgacagagtgagactcagtcgtctaaataatagtaataatagtataactacagtttgctaaacactgccccatagttggaccttttgattgtctccaagtctgtggagtggataccatcctgcacttttgccctgctgttactgtagacatttccaggcagacagttcaaagcttaggcctattggtaatgttgatggatattgccaaatcacatggaaacattttggaaatgtgatggtggcatggtttcgacagtatcagcagtgtctgtctttcgggctggtgctgggagggactgggtgctggtgactgctgttctctctcctgtccctgccacatttcatgtctgccttgacgtgtggtcacgcgtggtcagccacctgcttggtggcttttcactggggaagcatgcagggcagtgaccatggaagagtgtcccattctgccacatacatccttgggaagggagcatgtacctcccagtgaacatgtgattccactactactgggtgaccatgaggccatgcgggcatccgggccacaggctgagaggcacagcagctggggctgtgccctgcagagctcaccacttgttcccaaatgtgagatggggatgagacctacctacagggtggcgaggatgccacagagggtcagatgtgagccttagtatatatgttcagcatggagatgattaatggagagagctcctgaggaatagcaggcatccaatgactcctcctcctcttttcccttattttccccattaacagtaaaaaccttctgtttctcaaccagctttctagattaaaaagcaggaggagtttgaatactattaataagagcaaatatgtattaaatgcctttatcttcacatcagtcctttgagcaaacagcagatgttgtttcacattacagagaaggaagaggaggcacagagaggtcagagaaccggcctgaggtcactcagcaagtagggcagcctgtgttgaacgcagcacttggttctagagtctgtaaaactcactctgccccccacctgattgatgggctctgtgcccccaccctgtaccctcaacaggtcccttgccatactgtcccctccacctctcagaaagagtatggggttcctttctagatggtgaatcttagtttgctttgtgctgctgtaatagaataccctgaaactgggtgatttataatgaacagaaatttattggttcacatttctggaggctgggaagtccacatcaaggtgttggcatctggtgagggccttcttgctgcatcgtcccatggtggaagggcaaagagaaggcaagagagagcaagaggaggttgaactcacccttttataatggcaccaatcccactcatgagggtggaaacctcttggcataatcacctcataaaggttccacctcttaatactgttacaatggcaattacatttcagcgtgagatttggaggggacaaacattcaaaccataataagtggtgagtttgggtggtctctcttggcatgctggagctgggcttgagaggcccgtgtgattctgactgcctgggccatgtagtgcttgtggactgggaacaaacagcggggtggccagggccatagaaactcgcccagatcctctaggtgttgtcagcagggccacctgagtgggccctaggcattaggtggggacagggctgaagggcaagatttggttttccagatacactcatgggatttgtctcctgaaggaaggttcacggggtccaatgacaaggggtaccgccctaagtgcatttcaggaaggggtgtgctctggcagctgcattagagtgggatgtgtatcccagcagcctctgcctcacctaggggtccccacagacttggaacacctctgagccagggggccagcccccagcagaggctcagctgggttttgtgtatttagctggttgataggcacattcctattcctgttgcataaccggttctagccgcagagccctgcgggaggccaggtgctaatcacacacctcgctgttctgttctcggtatacagtgttggcaggcagcgtggcgtcttgtgatgtcttgcacctggggctcccagcacctcggagcagtgctgggagtcagtgtgttccacaccttggccagggccagcgctgtgctggcacacctgtcggtgcaattccacagcccagacccattccaggcagctgggatcagccctcatgacatttaatccgttgagtcgtcagaatcccactcactcaagacattccccctagatttgtatttctcaaagcttttttaaactttcaatttcataagtaatacatggatacactcttgtgaaaagaagaaattggagcattgtacttaaagctgatgtccttaggagctgggcgtggtggtacgtgcctgtagtccctcggctacttgggaggctgagatgggaggatccttgagccccagaagtcgaggttgcagtgagccatgatcatgccactgcactccagtccaggcaacagagcaagatccttgtctctctctctc

SEQ ID NO: 59392 - DNA, 2100 bp, Homo Sapiens
ttttcatgaagttggggttttaccattttggctggctggtcttgaactcctgacctcaggtgatccacccaccttggcctcctgaagtgctgggattacagacctgagccacagcacccggccttggtggtggtcttattgaaggggaaacgctttttgaaatcaataggatgaaggttttttaaaaacaatgaagtcttaaatcattagattttaaagtggggtctggaggtggaagacagcttatttctgctgtgtaacatttagtacttaaccatacataattatcaatgcaagttttttgtcctaggtgcaagattatatttatttgagagtatcaggtgaacaagtttacatttaaaggcgagaattgtgttaagcatttggtattgacattatagttttagtaaaaccatcaagttatctcgatagagtttgaaactaagctctttggtggactgctactgtttattaagtaggtatcacatttctatagcaagacatagttgagttttgtaaatctacttgtattttgaaggattgaattgtgaaaattatttgtcttttggcaatctttctgaatagagagcgtgcatgagcaagtttgcattgcaattaataggtgaaaattgctgagcacctaagtaaccaaaaaggaggtgatgaattaggttacagaattagttttgtccaccctttacctgtctactccattatttgatttttggcagcattcagcatgctttttctgtaaaggaccagtaaatagtaattattttaggctttgtggccaggatgcaaaattgaagatattatgtaggtacttaatattaaaagaaagaaaaaatttacagttttttaaaatttcagtccaaaatgtcaatctgtaaattttttgttgataaaaatacaacaatataagatacaacattttgtaatacaggcctactaatgagaaatgagaattttatttttgtgagggtaggggagataacacttagctgaattggggttcagagttagtgttttctataatcaaatcaattgctaatgtttatctgtaaaaaccattcttaccttccaggctgtacaaaaacaggcgataggccagatttgaccatggtccatacttccccacccttgatttattctataaaactagtagaattcgactaactgttttgtttcatcaaagctttttttttttttttttttttttgagacagagtcttgctctgtcgtctaggctggagtgccgtggtgcaatttcggctcactgcaatcttcgcctcccaagttcaagcaattctgcctcagcctcctgagtagctgggattacaggcgtgtggcactacgcccagctaatttttgtatttttagtagagacagggtttcaccatgttggtcaggctggtctcaaactcctgacctcatgatccgcctgccttggcctcccaaagtgctgggattacagtcgtgagccaccgtccctggccatcaaagcatttttaatatagaaggtcagttgagttgctgcctaggatgcaacctgatcttaatttacaaagtaattaaattattataaaataagtttgcattcatagattaaaaagtacacatttattttattattattataattttttgagatggagtttcgctcttgttgcccaggctggagtgcaatggtgcaatcttggctcactgccacttccacctcctgggttcaagtgattctcctgcctcagcctcccgagtaactgggattagaggcatgcgccaccatgcctggctaattttgtatttttaggagagatggagtttctccatgttggtcaggctggtctcgaactcccgacctcaggtgatctgcccacctcagaatcccaaagtgctaggattacaggtgtgaaccaccacgtcctgctaaaaagtacacatttaaaatctaagttccattttcccgtcatgtttattaatttgtcccattgcaagatatgtttctgttgtctgcatgggtagagataattttaaaagcttggttaagtaaaaactgattttcttaattattgccctttaggttaaaaaaaaaaaaaaaaa

SEQ ID NO: 59393 - DNA, 2223 bp, Homo Sapiens
atttgaaaggtcaaatatcatcagtggcaataaatactgtgtcagttatcttccttcaagtgacaggctcatttaagatatttttgagaaaatgtctgccagatacccagtgcttgagtggcagttgcttattctttcaagtaataacagtggtttgtgaaaatgttcatgattcaaagaatttcatcctaagcactttttcttgacacagtcattgcacttggttgtgcagcacagagctccgtatgcacttcccgtctcgtcactgctcgttacgttaataagacctctgtcaagggttgatatttaatcaagttaacactttttactgcttcatcgagggcattcttaagttaaactgactttttaaaacacagagtgaggaatcactaattccacagtacagcactactgctgccttgattagttccaagagccggtagttttaccaccatagcttttctatcatcagtgcaaaagtttcactatagcttttttatgatcggtgcaaaagtcagcactgtaaaaagaaatagttttattatgaaaatcgttttggtttcatgggccatattttgagaaccactgatgtctaagcctcagtttcctcatctgcagaatggagataatagtgtcccatttcaaagggatgaagatttcatgatttaatgcatgtaaagcacttagcattgtaccttacatagaacaagcattcagtaaatgttaactacccctattaatttcttgaaggaaggctgaacaataaaaacattttaaaggaaaaaaaggaaatctaacttagtcctactagcaaaacacaactgagttaactgttgggatttttgtccattcctcacacttttttcagtataatcctttcttttccctttttgtatagatacagattatcttatgtcaacatttgctgatgagaattccagggagcatgagtttcttgggttctactagttccacagaagcagtagtatagcctgatggtgaagaggcagattctagaggcagactatcatgggtcaaaccccagctctgccacttcctagccatatgaccttgggaaaggcatttaacttttttctgctgtactacctaccccattaggcttgttgtgaggattaaataagttagttgatgtaaagcatagaatagtgccaggcgtttagtatgcagtcagtatgtgttgcttattattaaatgaggaaagggctctctggttaaataaagttgggaaaacctgaactaaaaaaaaattaagcaagatttctttctttactgtaggattatttagtctttaatatgaggtatgaatttttaagagggatcttaaatcacatgaaaccgacttaaccatgggaatctttttgacatgggtatcttacagagctaatgagccttttctttttgagcatactaaatatccttaggctcttatattactttgttttcatcaggggtgagttcatttggggtggttgattttattaactgtctgttttagcattaggtttagaactcaggatgtttttaagaggacacacttcaaagtagaatattagttacaacatctgttctcttgtttaatattatgcagtctcagattggcctacatttgacaactactttacatctttgtggaaagattgctcaagtggtaattacagggtagatttcaatgcattgcacctatcctttaatctcacattcattctaataaaatatttgtagaatgaatattttgttattctgtggtctacatatgcctatgaaagtacgtaagcctctctaaaaacgaacaattctactgggctattattctgacagcaactctggctaatgcagttcccatttagtgagattttagcagtgccatgtctttgaagtataattttgaagcactctccgataactataatgctagaatcatttgatgatatatgtggcccaatttggtgtgaaacagaatgaaccttctaaaagaattactgctttcaattcacacctagttttaaattgcattcaagtaaaaaaactagcattttttttcttgtctttcaaggagaagtatgttttctctccacagattccttacttatatagtagtaatacagagaaattctaaaaatatttgaaataaaaatatagccctggtagggaatatttggatttttagaacccaagctttaatgaaaaaaaaaaaaaaaaagg

SEQ ID NO: 59394 - DNA, 2009 bp, Homo Sapiens
tcttttcctggtccctccagcatctgagtcctggggttctgccagcaactgtctgtcttttcccctgagaccggatccaatttccagtccttggcatgttgggtaatttggggttgtatcctggatgttttaaataatcagatgcgaggctctgagccctgcgagaacgcgcttgagaatgttggcattttcactttggcgggcactcatcccggctgggtcaggccacaagccgtatcccagccgctgtgtgcagtggatccgtgttggctcaattctcaaggctgttgctgtgcggcctgttccccacacgtgctgctcagctcaggcaagcaccgagcttgtgttgtttcatgctcagcgtggaggcccctcctccaggtcgctgctctgtggggttcccatacactcaggctcctaggaggagtccatttagaaagccagggtttttctcagagtcttagttccttgtgctgtcatccatttcacacgacttgggccctgctcggggcaacacagcaagagaaaagacagggaaaataagagagggaccttgcacacacacgctctggaccacagagccctgtgcccagctcctctgtcaatacaggtggaatctcgtgcaggatcgcaggggtctgtgatgccaccaaagagcaggccgggacagggttaggagagaaaggagagggaagtgggggtttctcctacgcactcttatttgcagagggaaaggcgggtttgtattggggttgtcggtctttgcacccacggcacagttgtgagacacccccatcctcagatcaaagccgcacatacagctggggaaaaacaaaacaaaacaaaacaaaaacagtaaacctccatgccagttgttggtaagttttgagtttcctccccagccagctgctactgttagcgtttcacagtcctccaggagtcgctttttatattctgtccaaagggagagaggagctgtagtggctgtgctccatctctgccagcccagaagtttccagaagtgctcttctgattttacaggtgaagaaccggagtcctgggggtgtaacaagcccaggtcctcaaggcaagggtgggaactcacgagcgcccaactccaagctgtgtcctcgccccgcaagcttgtgctggtcactgctgccctgtgccccccggatagaaacactgctggaggagaagcctttctcagagccctggggaaggggatggtcaggccacctacactcctggccctgctccactggctgcactggagtggcatctggatggacagcagccggctggagactgggaggaggcctgggtgcaggaggctggggcgctgggcagcatgcgccgcggggcagcaggacgcaggggcctcccagcgggactcgcacgtggcactctctggggcaggtggtgacgggaggcagacacactccaggggagtccctcagtcaccatgctccaggtacttgcgcctcacgtttagaaccagggtagatttggagactcctgggatcttttgacaaaatttctctccaatctctaagtacaaaggatgctcctacaaagggccagatggcaagtcctgggatggaacccctgcccttggtgccaccactgctctttcataactgtgggctcttccgaaagtgacttcatggctcagtgcctcagtttccctttttgtaaaatggtcatcatggctgggcgcggtggctcaggcctgtaatcccagcactttggggggccgaggcgggtggatcatgaggtcaggagttcgagaccaacctgaccaacatggtgaatccctgtctctactaaaaatacaaaaattagctgagtgtggtaggtgcctgtaatcccagctactcaggaggctgaggcaggagaatcacttgaacccggtaggcggagcttgcagtgagctgagatcccgccactgcactccagactgggcgacagagtctctgtctcaaaaaaaagaaaaaaaaaaaaaaaaa

SEQ ID NO: 59395 - DNA, 1733 bp, Homo Sapiens
cactagtgaactttgtcatcactattattattggtgaatttcatcggtctattagcataggagaattgcctatcattttgtgtatctgtggaaagaccaggagaaggcattattttctggtagagcaagaggtggatttactttaggagattattcagttgtgaggtgccatctgtgcattttctgtaaatctttctgaagtgttgggggaaaaagtgaatgggtactcaagtcagggaagcgtaagccatacgacactcaggtaagaaacagatttttctcttaatgccctattcttataggaaaattcacttggcaataagaattctgcctacacagccttgcagatctgatgcaattatcaaagccatgttttgcaaaatgaaactgatgccaagctcgtgtcaagtggattatagattgtagaactgcagtcactggccattagctgagtgtctttgttttctactctaaaatcttgaattccttattggttctgcttctgatgtgctgcgtggcactcttcctgtggaaatggtcttgcaggagatgattttcctttctagctcaagcttctcaagtgcccaaccccggatcagcaaccccagggcttgtcctgttcgggaacacgatggagttcagttgctctttgatccccttcttccacctcaagacactctctcttctccaggtatcacagtgtcctctttcagtcttttatttggaatcatccctttctcccattttccctgttaaacatcctcccttaggtgcctttggaaaaagatttgatgaactgaagaacagggaggtattggcccattgacttcatgttttactactgcttacgtgtttgtctgttgactgggaacggtttctctagttcaacaatgaacccaataggtgggttttcacactggctaggctttggaggattgcatttttttagacataatgtgtggggcttagggagggcagccaggcagtgtgggatgcaatctcttctctgaagcagctggttctcgctataagctcagccacgtacattccactcccaagtttccttggcgctaaaactgcttggaatagcctaagcctacggaagcaaagatgacttatttaaacagcttcatggttcctattacctttctttttctgtatcttctaactttccatgtcttcctgaaggacatgttccttttgtcactgatatttccagtcaaatttagtgatcttaaatttgatcgagagtgaggtgtaactcctaggagaaattctgagtgtttataactaggtttccgaaataatgtgtttggggaagtctctgagatgttattaattttgactttttattggtaagatctctaaaaatgaaagagtattttcacaacagttcatgtagatataatttcttggcatgtggttttggcaatcagagttttatttatttatttttttccctgtacctgcttggttaggggagactttaaaatcttgtcctggcccaattgagaggagttatctaggaactgaaaaataggtaggccctggctgctacctcctttctgggctaagacccgtaacctgggtttcttcatttgaagtgtgagaatgcacgtgtaatcccagcactttgggaggccgaggcaggtggatcacctcaggtcaggagttcgagaccagcctggccaacatggtgaaacccctgtctctactaaaaaaaaaaaaaaaag

SEQ ID NO: 59396 - DNA, 1899 bp, Homo Sapiens
ctttccttcacatgttaaaaaattaaagacatgaaaaataaaataccaaaaaagtactaacatacaatcatttgccttgcaaatttcaataatttggatttcctggtatgacatctatttctctctacaaaatttgagcttcgaggtaggctcagtgtgctaaacagggttaggatgctaactatgttgctatgtaaaccagtcctggaatcgtaattgaagccatgaatcatcaagatggtcttaaagcatttgctggtcatttttgatgacccaaggatggcaatattatcagctaggaatgtctgctagctccctttctttcacagaatttttaaaatgtgtcattttggaaattaacagaaacaaacagtgcctactttgtgtctgtatttgcctggatgaggctctttcaacaacactcttttcttgtcctctgatggaagaggatcctttctacattattaattcattcatccactcatgtattcatttactcaacaaacatatactaatattacgcctcaactagtgccagacactacattatgtggtaggacatggtagtggataagacagatgcatcttttactaaacagagtctcttactctgagcagttaagaagtttagccttccccaagttattcagcctctttctttcttcctgtgtatttccaaggcattaccacaaggctctgatttgctgctgacctctgtaactggaggatcccagagctgtgggtctgggcacatgcagtgggcatctctgaggtgacccctaagaagcaagtctactcaatgctgtgcagacactggctacttcaggggccacaaataccaatggaggatcaaaatgcacaaagtaattgcctcctgatgctttattttattttagaagtcagtccagctctcaacaacctacagcaaaccctgaatattgtgacagttcagaaagaagtgatagacaccaatctcacaactctccgagatggtcttcatgggatacagagaggtcagcatcttcctaatccattgtactcggttggcttcttttgttgaacgttttagatacttatacctccctatctgtgtgtgcattaggtgatattgatgctatgatcagtagtgcaaagagcatggtcagaaaggccaacgacatcacagatgaggttctggatgggctcaaccccatccagacagatgtggaaagaattaaggacacctatgggaggacacagaacgaagacttcaaaaaggctctgactgatgcagataactcgggtatcaggcgatctctggccaggacatcttagccattctctccattgttatgtgttttggtccatttccattcttccctggtaaagtctgatctcagaaactaaaacattagaaaacagctccacctgatacaggatatattcaaagcgtatagatatcctgctagttggaaggaccagacaggatttttaatttttagaaaatacattgaaaatgctattggtttgcttttttacaaagtggagatatatgtttctaaatcatgaggcattgaattatgattgatattaagaatcagaaaacaggctgtgttttctgtgcgctgtggctcatgcctgtaatcccagcactttgggaggccgaggtgggtggatcacgaggtcaggagatcgagaccatcctggctaacatggtgaaatcctgtctctactaaaaatacaaaaaattagccaggcgtggtgatgggcgcctgtagtcccagctactcgggaggctgaggcaggagaatggcgtgatcctgggaggtggaggttgcagtgagctgaaattgcaccactgcactccagcctggacgacagagcgagactccatctcaaacaaaaaaaaaaaaaaaaaaa

SEQ ID NO: 59397 - DNA, 2924 bp, Homo Sapiens
aaaaaaaaaattcagtattagctttgactatagccaattttgaatttggtccttatggagcaatatttttcttcagacctcactataaagcagaatagaatggttctagacaataacttttcatggagggtatagccagtcatcatcaatggccatggataaaatcctaactaaaaattccactttgacaaacatggtctcctaaatatgtctaccaggatgcattagctgcaaagtgcatccatccatgggttacagggtaaactgaccttctctatggagttctcttataattcaccagttatattggaaactatgctgaaaacaatgcctgcacttagctaatgctcagtctaattcctggaaataaacaatcacccaaattattttccttttcccccaacatctttttcttcgtattatactaattcgtgttcattgaggaaaaattagaaaatggagaagaaaaaaaaatcacaactctatcatgtaaagaaacaatactaacattttactcatgctgtcaaatattttcctacccacatatattttgcctgtgtctgtctttaagctataagttgtgttgatcctgcttcttacaacctactttagatcagctttacttccatcctacaccatatggaagtgcattctccaagattcccggaattccccagagattcatatttatctttgtctctttgtcaacattggttatgacatctcatttctttcattttgtagctatttccttttctccacttcgcaaatagctccattctccccaaacacatacaatatcactcacgaggtagctctaagttctttggccactgactaccttgttcctatgctctttctctgttccttctctcttctctccttcccacatccgaaattcctgtttatttcttatttatggtaccttaggaacatgccttgatgagatagttcagaatatgagggcctgggtgggaaagaggcaaagaccctaaaagaaaccatagtgatagctagtaaaatactttttttttttctcacaccacatcatgtacttgacttaaagaaggaaaatagagtcatatgactttggcatacaacttctccattggtcaggctgaagctttcttggaaccccactctaatctgagactcttcccacttgatcttccttccttcctcgactcttttcaaatgttagaactttattatgatcttaagcttcttcttgccttcttcagctccttctccttgtccttcttgaatattctaccaataaatcttctgcaataattctgtcttggcatctgcttctctgaagaacccaaaataatacacacacacacatttaccaagtgaccataaagagtcacaaaacctgttcttgcaaaacttggtgatgtgccaagctcgtttcttttaggtacttgaagttcctttcatgacaagtttactagaggcagacactaaaatattctagtgctaactgctcttgcggtttctatcatactcctattaatgcaagagcagatgtgcttgtacatttttccaacaataaaatattttgagtatctcttttgctagttagcaaacccgatactgatggagttagttctcattgaagcacttgcagtagctgcttctaaagcacagatttgtggagtgcttgctctgaataggattcttcagatatcaactaaccatccctgtggagcagattcgccccgtgcatgcatgtacatatcacatagcctatgcatatttgaaataaatttcagtataatgtcgactttacccatgacagtaaacaacagcatgtcatgactgcataatggtcaattgcatgaatatcccacttattttaataaattctgcaagataggttattttgggctcctaagttttcactgtttctgatttagcaaatctgtatactttgcagtgtccaacttttcatagactatttcctagaagaattattggcttaaaaagcatggccaattttaaggtttttgatatttgttgccaagaagtcagccaggaagtttgttccaatttacacttgaaccatttctatatgagtaggcttatttcttttccttttattttctgcatgtgaaattatgtgtaaaatgtacagtccaaagaacaacagaaaaaaacctaacccttgaatcctccaccaaggttatgaaatagaatttattaagttggtgcaaaagcaattgcggtttttgtcatgacttttaatggcaaagaccacgattacttttgcaccaacctaatagaatcctcctgcatttgctgattctcatcatacttcttcatgcctcccctcttcacaggtaaatcatctagaatttagggttatgcattcccttggttttcttcatagttttcatagttaaatgatagagtgtgtgtgtatatataactatttgtagtcctaaatattatatagattttttaaatgtgggtggcaaatacaaagctagttgtgtgaggagggtatggtcaccgctgttaggtaaagttgtctaggacaagatgaacttgcagtcttctgcatcctgggactttataagggggctttctggtatattcagagggagagaccatgaagctcaccacagtccatacatttgcaaggactgtaatgcaaagcaggtactaaccacgtgatcagtgggagtggcatgaattaccctgggtttcttgctgctaagcttgttccagctcgcagaagtcagtgataacagaacactttggcagaatgaataaatgtccacagttgatttaggcagcaggacctggaagaaagaataaggaatttattagcaaattgtcaagatcactagattcgtatccgggccagtctcaccagaacatttctccaggtgtttaaaaaaaaaaaaaaaaaaaaa

SEQ ID NO: 59398 - DNA, 835 bp, Homo Sapiens
ttttttttttttttggggtacactggtgtcctttaattgtttactctttacacacaaagaacagataggtcctgaagggccctttgatagtctcgcagcactgatgagtgatcagctctcccctctttctctggaactcggtagcttcatgttggcacctatcacagacgctgaaggcattataaattttattttaaatcaaccaagagcccaaaaacccaacccatatttcgaaaaaactccaaggtgtactactcttgtagggttctgccatcctgccaccttacagtcctttggttttccctattcttgcaggcaagtgcaaaagcaggtggttttgggaaggcaattcataattactctgaagctatttcggcataatttttcaactagatttttttgtttttttggagacacggggtcttcggcctcctgtggctcctaggcttggagtgcgaggggcgatgactcagggcctcccaagcagccttcaagccctccctgggctcaggcggacccctctcgccgtcaagccctcccgagtaggctgggcacccacgaggcttgctccaccacaccggggccaatgttttttgttatcgtgttttgtttttccttgtgcttggtgggccccaacatggggttcttgttgtgtggcccggcgcgtttgttttacgcaacgtggtgtggggctccaaggtgttgtctcgccgctgcggctctcccagagcgcggggggtgtgtgggccccaggcggcgcggggcggagaatttctgtcttcttacaacgcaccctgcggtgggggaaacactgcacgcggatattttcagcgtg

SEQ ID NO: 59399 - DNA, 3005 bp, Homo Sapiens
tttctctttagaacatatcccacacttgtgaaaactagcctgtttaaaaagaccaaaagaaaaacaaacaaataaacaaaaccaaaagaagctgaacttgttttaaagctagaaaatattgaattagtctaactagttttatttattttctttctttctttgtaggtgggcaccatctaatagttttattttttagttacccttttaagaatttgtaatttaagccacacgtaccttttgttgtgttgtgatatttacacaccagtgttttatcctcactcttttctaccttctagtgttagcttccccttgaagaacacacccttaaatgtctcctaggctgtattgcttcatcaagagtgtaaacaattacagcataaaatggtacctttggaaatgaagtcatgcgtctttcttaattgctgaactcttgtaattctgaagggggtctattttagcctgtacttactcccatacttgctaacacaagcaaatgggcctacacatacagctaggaaaagcatgaatctaagggtttcttagggttccataattatgcatggaatgtgcaggagcaggaatgtcaaagtaggagtaatcatgatagatttagaaagggccttagaggttagttggtacaaaatattttacagtgaaggaagctggaattaagcaggtctgggtttcttcttcctagcttcccctcccttcgtcccattgtaatatatggctgtcaggatgacgtttctacagcaaatttgatgtgcataaactttgctggcagctttccacacttttagaataaagttctgatttctaaaggtcacatatgaaggccttttgggatgtagtttttgcttgtcttggtagcttttctcaccacttgtacacatactgcctataatgatcaaattccttggtggtcttatctttttggaccatactgcttgtaattctctaattccttgatggttttatctctttgaccactctggttttatctcatttgaccatgctttcacacatgatattctttctgacaagaaggcgccctccaccttcccccaagacacacattatctagttcagaggctttcaacaaattttttcttttagtatgaacccagtgtggattgcaattacattatgaccatatacatatataggtgtgtgtgtatgaatgtacatgtgtgtatgtatattatacgtaatatatattttatataaaaatctaaataattgttatgaacatacttatttttatatgtgatatacttaactttgatattagtaatatctgccctttgtacctgtgcacaacagctttggtgttggaagcctttttttgagctccaggtctgattcgatcatcttcacttgctgagtcacacgtcatagtatttacttgttttgttcctctcactgcctcagacagctcttgagggtagagactgtgtctcacttgtcctagcacacaggcacagacctaataggtgctcagtaaagagataatgaagaaactggacccagtgttctgctacaaattgatagccaaaatcgcaaagacagaaaagagccccatatttctcgattctcaagacagagctatgcatcagaatttttcatttagagtaggacttggagaatggctagacataggatgaattattttttttctgagggggaaatgtgagaagacactatcatatatactcttagttataaaagaaaaaacccacaaaatacaggtattgagacttaattacatacagccaaattcacactttttaatatacaattgttttgaaaaactacaattgtgtaactgctatcaaaatcaagatatagatcatttctatcaccacataaatttttttaatgcctcttcgtagccagcctcttctccaccccccaactgttgccaccactgatcaattttctgtgtctataggttcaccttttccagaatgctgtataaatggaatcgtgcaatatgtagcctgttgcatctagcctcttttacttagcataaggtgtttgaaatcatccatattgttgcttgtatcagtagtctgctcctttttgtgctggataacattccattgtatagacataccaaaatttctttatccattcactaatttaggttgtttccagtttggggatatatatacacatatatatgtgtatatatataattatatatattattatatattatatttatatataatacatatatattaaaacatatataattatgtatatataatttatgtctaggattgctgggtcatatagtcataagtatatgtttaattttataagaaattaccaaactgttttccaaagtggttgtaccatcttgcttgttgccaacagcatatgagagttccagttgttccacatctttatcagtacttggtattgtcagctgctatttaaaaaaaatttagccattctaaaagttgtatcatgtctcattgtggtctgatttgcatttccttcgtaactactatgaacatcttttcatgtgcttatttgccatttgtgtatcttatttggtgaagtatctgttcaaatcttaaaagcccattttaaaatcagacttttcttattattgattataagagttctttctacattgtaatataaattctttatatgttttgcaaatatttcttcccaatcttttttgtgttgtttcattttcttaacaatgacagcacagctttgaaagtctttgaagggaatatcctaaaaggtactaaagtagaggttttaccagcctgggcaacacagtgaaacctggtctctacaaataataataaaataattagccaagtaaggtggtgcttgcctgtagtcccagccacttgggaagctgaggtgggagaattgcttgagcctgggcagttgaggctgcagtgagccatgattgtgccactgcattctagcctggggcaacaaagtgagactccagtctcaaaaaaaaaaaaaaaaaa

SEQ ID NO: 59400 - DNA, 1148 bp, Homo Sapiens
tttctgataaatattccatctgctggtgttacctattgcccaaagataggtatgaatcagtcttaggattttgaaaaatctttatattggtagctaactcatttttaatgttgtgtaattttttatatttgttctcttttttcttaacttttgcacaattcatttgtcctggtgtattttatacttatgtattgatttcaaacattttcaatctatattttataattattatgtttcctgttgctttcttcattttgtataatgcttatcttgatttacaagtttgacttaaccagtaaaataaatattttaaaatttgagttaaatgatttttatactgtttcattataagaaggatttatattttaaaactttattaacattattatactctgttttaataataaaataaagttataaatattaatctattttattccattattttgctcattttgaaatttatatctttaattttcaccatttttaggtaatctgcaatcttaattttgattttccttttgatgcaaaatgaattttaaacatttatctttactctcaaattttagggtattacataatctttctttctcaccatctgttacttttacttaaataccattgtattctgataattcagcctatacaactgtggtttttatttattgagatttaatttttatgataatatgtgaaggaaatttgaaaggttttatggacattataaaaaagatccttctcttgcggagaattacaggctttgaaaaatatatcaagaaaaagaaacagagagatctatgtgaatatatacacaaatattattaaaactactgataggtcggccgggtgcgctggctcatgcctgtaatcccagcactttgggaggctgagatgggtggatcacaaggtcaggagatcaagaccatcctggctaacacagtgaaaccctgtctctactaaaaatacaaaaaattagccaggcgtggtggctggcgcctgtagtcccagctactcgggtggctgaggcaggagaacaacgtgaacccaggaggcagagcttgcagtgagcggagatggcgccactgcactccagcctggacgagagtgctagatgccatctcaaaaaaaaaaaaaaaaaaaaaaaaaaa

SEQ ID NO: 59401 - DNA, 1901 bp, Homo Sapiens
aaaaaaaaaaaaaaaaggggaaaaaaaaatgaataaagtgcttgggtagttctgatgagagagattatgtctaagaatacatcagggatggcttcatggaggaaaccatttttaatcttggccttaattaatagatacagagaaagaaagataaaaataaagaaaatagcttggcattccaggcagaatgaacaataaaggaaaacaatattgccttttgcaaaaatacactgtttttttttttgagggactctgtgttttcattgtttgtaatatcacgtctccgtgttaaagacctgtgtgtaattttcagtcattaattatgcacggatgatttctccctatgcagaatgctgtttgggcttaatcaggcaatcttttaaaagatgtagtctctagggatttgctatttaagaagtggaactagctacgttataattaaataattcctgctacagtaccatgtaaaaggtcattcatcattcaacatttatttattctacaaaatatttatcgagtgcccattatatatctggtactattctaggcaatagagatacacataagtcaatatttatccctcatggggcctaatattctttttttgttctttttttttattattatactttaagttctagggtacatgtgcataacatgcaggtttgttacatatgtatacatgtgccgtgttggtttgctgcacccgttaactcatcatttacattgggtatttctcctaatggtatccttcccccatccccccaccccacgacaggccccggtgtgtgatgttccctgccctgtgtccaagtgttctcattgttcaattcccacctatgagtgagaacacgcggtgttcagttttctgtccttgtgatagtttgctcagaatgatggtttccagcttcatccgtgtcactacaaaggacatgaactcatccttttttatggctgcatagtattccatggtatatatgtgctacgttttcttaatccagtctatcatcaatggacatttaggttggttccaagtctttgctattgtgaatagtgccacaataaacatacgtgtgcatgtgtctttatagtatcatgatttataatcctttgggtatatacccagtaatggggtggctgggtcaaatggtatttctagttctagatccctgaggaatcgccacactgtcttccacaatggttgaactagtttacagtcccaccaacagtgtaagtgttcctatttctccacatcctctccagcacctgttgtttcctgactttttaataattgccattctgactgatgtgagatggtatctcactgtggttttgatttgcatttctctgatggccagtgatgatgagcattttttcatgtgtctgttggctgcataaatgtcttcttttgagacgtgtctgttcatatcctttgcccacttttcgatggggttgtttgatttttttcttgtaaatttgtttaagttctttgtagattttggatattagccctttgtcagatgggtagattgcaaaaattttctcccattctgtaggttgcctgttcactctgatggtagtttcttttgctgtgcagaagctcttgagtttaattagatcccatttgtctattttggcttttgttgccattgctaatattcttaaattatatttaatatcaaacattctaagaaatcactctgtaatgaatgtaaaaccacctttgggtagagagtatgataccagtagttctatttaatcttccttttaaacaaatatatatttattttaaaacatgggtttttcatgattttttttttggttaaattttcagcaatgtgtttaatactccaggataccaaaaaaaaaaaaaaaaaaaaaaaaaaaaaaaaaaaaaaaaa

SEQ ID NO: 59402 - DNA, 574 bp, Homo Sapiens
ttttttttaaaaattaagactggggtgatttattaatcttgttaagaactctgatacaaagcacagtaaaaggccacaaaccagtaaataaacaacgtggcttttggctactttacaactgctgctacagcactatcagcaaaacactctatcactttgaacgaaggcatccaaatggcaaataaaagctttactcacttatctgattaaaatgtttaataaagctttaagtatttgctggtttaaatattaccaatctaaaaaatatatttaaaaaaaatttcagttaacacgagatttatagagaaagttactaggtcttgaaggcaaggcagttggttcctatgccatagaattttttttgaatttatgaattagtaaagtagcagattgtattataggcctcaagtcacttaaatttatataggttattagcagtatctttaaatatacaatataaacaaaactgtacatacatggcatattaactgttttccataacaataggcaattcattagctaaagacgtcatagtctgcaaaaacaaaaggcacatctgaatgagatacatgcc

SEQ ID NO: 59403 - DNA, 724 bp, Homo Sapiens
tccggatctgagcctcccgcagaggaatgcagaatgacgccagggcacgcaggatgtgatgtcaccgagatgcagaggatactcagtcaaccaacatttactgagcatctacttcgtgccgtatgtacgaagctagcaaatatgtacagcaccagtactgattgcagggagcactgtagaagaggaatgaaggccaaacaattaaaagcggagcgtggaggtcttgtcaacggaaaggggtccctatccagaccccaagagagcattcttggatctcttgcaagaaagaatttgaggcgaatccatagagtaagcttagtgatgtgtgtcagacctctgagcccaagcaaagccatcatatcccctgtgacctgcatgtatacatccagatggcctgaagcaagtgaagaatcacaaaagaagtgaaaagggccggttcctgccttaactgatgacattccaccattgtgatttgttcctgccccaccttaactgagcgattaacctgtgaacttccttctcctggctcagaagcttccccactgagcaccttgtgacccccgcccctgcctgccatagaacaaccccctttgattgtaattttcctttacctacccaaatcctataaaacggccccacccctatctcccttcgctgacactctctttggactcagcctgcctgcacctaggtgattaaaaagctttattgtcacgcaaaaaaa

SEQ ID NO: 59404 - DNA, 335 bp, Homo Sapiens
cagtctgtgctgactcagccaccctcagcgtctgggacccccgggcagagggtcaccatctcttgttctggaagcagctccaacatcggaagtaattatgtatactggtaccagcagctcccaggaacggcccccaaactcctcatctataggaataatcagcggccctcaggggtccctgaccgattctctggctccaagtctggcacctcagcctccctggccatcagtgggctccggtccgaggatgaggctgattattactgtgcagcatgggatgacagattgagtggttttatgtggtattcggcggagggaccaagctgaccgtccta

SEQ ID NO: 59405 - DNA, 2206 bp, Homo Sapiens
atccctctgatacaaaaaagtatcatctcataatacagtagaagaaacaggagttcagagaggttaagtaatttgcccagatcacacagctagtcaggactcatgctcagatttgaagttggagctttcagcctccaaagtcgatgctctaaccttatcctaaaccgcccctttatagcaccgttgggaactattttcccttttacccattcacttcccactggaggagtctccattatttaaatttcttacttcaacaagtccccaattcaatcaagataactaccaccaaaacatggaaaactgcctggtctacacagcagttgcaccccagcattgctatgctgcattcacagcgggagacgctgggcagaggcagttcagagactcactccaggcccgtggctacaagtgtaggaccaagaattgaaccccagactcctgaccctcctcctgatttccattccccagtgagccatcctcttcctgcgtacccctggcttggcaagcagaagaggctgactccatgagtgtagacccccagatgctgccctgccagcccctcactcggcagtgtgctgtctcctgagacgcattgccccgctcctgcaccgttgacaaggctgaattgggactgtgaagccggccattgtgaaacaagagggcttttttgatgaaatcataaatcaggccctgtctctgctggctgtgctttggaatctatcagagacacagcccatctcccacagaggaatccaaatggtcctcacagtgccacggcccggggatggcagcccctctgcaccttgcacgctggctggttcactcttaactccttacccagctgaaagtgaatgggcggctagaccaagaggagtttgcgcgactgtggaagcgccttgttcactaccagcatgttttccagaaggttcagacaagccctggagtcctcctgagctcggacttgtggaaggccacagagaatacagacttcctcagagggatcttcatcagccgtgagctgctgcatctggtgaccctcaggtacagcgacagcgtcggcagggtcagcttccccagcctggtctgcttcctgatgcggcttgaagccatggcaaagaccttccgcaacctctctaaggatggaaaaggactctacctgacagaaatggagtggatgagcctggtcatgaacaactgaagcaaagaggaaagcagacccatggctcaggttgtctttgcagtttttgatgccatcatctgtagcatatgagtctttaattttgatggagtctaatttatctattgttttcttttgtcacatatttttggtggtatagctgagaaatcattgcccaacccaaggtcaaactatttattctgttttatagtttagctcttacatttaggtctttgatccattttgagatcattttttatatggtgtgaagtaacgttctaatttcattcttttgcattcattcatttgtcccagcaccagttgctgaaaaaactattcattctcctgtttctttgtcttggaacccttttcaaaaatcaatttaatgtaagaatgtatttatggacgttcctttctgttcaattgatttatgtgtgtatcttatgccagtatcacactttgttgattgctacaattttatagtaacttttgaaattaggaagtgtgaattttccaactttattttacttttcaagactattttggctcttctgggttccttgcatctacatataaattttagaatcaacttatcagcttctgggattttgatagagattacattaaatgtaaaggtcaatctggggaatattgccatcttcgcaatataaaatcttttgttccatgcgtctcttcatttttctgtatcttctttaatttttttgaacaatgatttacagttttcagtgtagaagtcttacactttccttgttaaatttattcctaactattgtagtttgggatgcaattttaaataaaattgttaatattattttcagattttcattgctagtgtacagcaataaaaattatttttatattgatcttatatcctgcaaacttgctaaacttgtttattagttccaatatttttaaagggcttccttagaattttatatattcaaaagtcatgtaatctgcaataaagttttatttttccactccaaaaaaaaaaaaaaaaaaaaa

SEQ ID NO: 59406 - DNA, 4314 bp, Homo Sapiens
gcgggaaggtgcgggttgttggctgaggcaagccgtggctcgggcgacgcggggccaggagggcaggaccgtctgccggcgacagcccataccgtctgccgttgcgcgacacgaaccaccctccgatccgccatccccgcgtcgtcgccgctagtccgcccgcccgccctcgggccccccgctgccgagcccgacctcctaagagctgaaagaaattattgagagtcatagtccatagccccctgcttcgtcccccaaccctcaacgacgaaaaggacttcggtcccctggcccggcgacgcccgggaaggaaaggagagcgacctccgccccgcgctcaggccaccctggagggagaagccgccccgcggccggtagagcgccccgccgccgcggagacccgaagccgcctggagcccaaggctgtacacgtgccctgtgctgattctctgcctaggaaaggaccatgcagctagagatcaaagtggccctgaacttcatcatctcctacttgtacaacaagctgccccggcgccgggcagacctgtttggggaggagctagagcggcttttgaaaaagaaatatgaaggccactggtaccctgagaagccactgaaaggctctggcttccgctgtgttcacattggggagatggtggaccccgtggtggagctggccgccaagcggagtggcctggcggtggaagatgtgcgggccaatgtgcctgaggagctgagtgtctggattgatccctttgaggtgtcctaccagattggtgagaagggagctgtgaaagtgctgtacctggatgacagtgagggttgcggtgccccagagctggacaaggagatcaagagcagcttcaaccctgacgcccaggtgttcgtgcccattggcagccaggacagctccctgtccaactccccatcgccatcctttggccagtcacccagccctaccttcattccccgctccgctcagcccatcaccttcaccaccgcctccttcgctgccaccaaatttggctccactaagatgaagaaggggggcggggcagcaagtggtgggggtgtagccagcagtggggcgggtggccagcagccaccacagcagcctcgcatggcccgctcacccaccaacagcctgctgaagcacaagagcctctctctgtctatgcattcactgaacttcatcacggccaacccggcccctcagtcccagctctcacccaatgccaaggagttcgtgtacaacggtggtggctcacccagcctcttctttgatgcggccgatggccagggcagcggcaccccaggcccgtttggaggcagtggggctggcacctgcaacagcagcagctttgacatggcccaggtatttggaggtggtgccaacagcctcttcctggagaagacaccctttgtggaaggcctcagctacaacctgaacaccatgcagtatcccagccagcagttccagcccgtggtgctggccaactgaccatctacctgcccgtggggccaggagcacccaagaccacagaaaagagaaaggaaaggccaaaaaaaagaggaaaagaaaaatgtacaaaaagattttcgatcttctcactcttacttctagaaaaaagatccagcccaggcacggaatgggagggccctgcaaagcacccaagtgtgtttcactcaccccttaccgctcgcccaccggcctgtgatttatttggttggtttgggttttatatttctttttcttttttttttttcttacatgtagttttctatataacatctttaatgagtggcttcctgtgctaagaatggtccagatgtgaactgctgctccctgctcctcccttcctccttcacactcctagtttaggattgatgtgtccaagctcatagggaagaatcagctgcagctggagcctgaccctccctggaacagggagaggctggcccgtgtcactgcctctgtcacccagctatcctcgcactcaaagccatccaacctcagcaggccttctcgggccctgccacctgaataggtctgaccccagtccccactccctttcaggctgggccacagggagttgctggctggccacttgacaccctccccctggagctgatgtctgtgactacagggagattagcacttcgtctagtgaaactcctttcatctctgtcctatggccccaccccaccattccctctaggcccagaccatcatcatggccctggccattgatgtgtatgggctttctttccctcatgcagccccttcttccccaggctggatgttgtgggtagggaggggtgtgtgtgtgtgtatttggtttgctgtccttttttaaaggattccaagccatgtgaaacttcccttctggatgtgattctgggtcgcaagtccttatttatatgtgaggctggggaatgggctgggggtattggcagtccttttgcagggcagtgtgtgtggtggggtgacaccgctgtggcttagcccaagacactcccagaggaaaacactgcagaaggaactggtttgcagactgtggaaggatctgcagttttgtttttgaccaaaaaaataataataagttagctctgaagggcagagggaatacccaagcccctgatgcctatgagaagtccctggacttcaaccctcctgttgtttggccttagcccagagggagctgctcacctgagcacccttgggggtgggcagagaggcagggtgggattttagagttagtgtctgtgcgggggcagccctgagcctggagttgagactttggggtctcttagtttggaggtgttgagtgcatttgtgcccctgcctggttgagagcttcttggtacctcttgccaccccttctcactgccctgacccaaccccactggaccttgatgctgcgaggagtggtgtcctgacggactcagcactcccgcctgatgtattggatcataggagagcacttgctctcctgcctctgccaggagagggcttgttcctccaactctaggaggccaggcaagcatggacaggagccaagggagcagggtcattaactttttcttctttgcaaagtgggcacttggcatcagggtcccaatcaccagaaagcaccaaagcccctggcaccccacccactccatcctacccagggaccccaagtaggcaactgttatggcagtgggtccagcccaggccagcactgccagcctcctctccctgcagtaggcaccagctctacctcccccggcaggcaatgtcctggcttctcagcccagcaccatctgttcccctagacttctcaggggccagcccagtctgggccaccctttgtttccctcatcctcggctcccacacaggtgacagacccagcagatagcttctctctgggaaaggttggatgctgccttacatccccttctagccctcctcccatccacacacacaggcacccacccacaccaggtcggcttgtttctcacatgtagggagagaggggagaccaacccctttgtgtcttttgaaatacgaagaaaaatgtgtgttcaggagcatgactccagtgctgcgctcttgggcccagttcagtctgtcttgtctcaaatctaggcatttttgcttcaattttattttttttaagaatacaaaaacagaaatctgcactaatttacctggtttcgtaggaaaacttttttttattttttacattttttggtgtccgtttgtattgaataatttgctacatttgtaaaatgtaagaggtatataatatatgtatatttctaacgtaaaaaacataatttttttcttttcaagattttttcttaaaaagatgagagaaacatattttttcaggaaaaacaaactttaaaaaaaaaagaggagaaataaaaccttttctcccctttccccatcctctatctatccctctttcccaggaacaaatcaaaaggtggattatcttctgaagaatggaaactgttagtccagaatgatgtgtttttctcaatgcagtgagttatagattctctagttttctccctagggatgggaagggggcattgaggcaagcctggagaggagcccggggagcagggtcatgaacttttttctttagtgaaggaggaatacaatcaagggttttgtattcagaatgttgtgcaatattttggaatgggacattggtgtgtttagagattttagtttaaaaacaaaacaaaaagattgatcaaatctgtacagtttctattgttccagatttttttaagtttgtattaaaagcatgatacat

SEQ ID NO: 59407 - DNA, 682 bp, Homo Sapiens
tttggagaaagctgctttctggagcagtttcagttttatttttgtatttaaggctgaaggacagtttcaataaacatgcttcttcccagagggatttcaaagaaagatcgtttttgcatgtcatataggggagaatgaggacatgagacaccaagaagatgaagttttcaggagcagaggagaaactttacaccaacatgtctgaacttcattgactcactacctggagccattttttagctgttgagttaagaaacagaaaaaggagcctggggcttctgactctttcaccaggcttaggggagtgagaggagggtttagacacgggtagggcctcttggccccttggtgcagccccgctgagccatctcctcctttggctgggtgactcctttctgctgccttgacaactcctgttgctgccacaagttctgctcccttcgtctttcctttgaatcctgggtggtgcacgaactaaccttgttcagcggacttagagagaacttctcatgaatcagattctgcaaacagatgttcaccttttgaatctgggctaaccgggggcgaccacgctctgagtgttaatctgttagaatattctcacccagggcccctagatgcagctgcttgcgctgtgcctccctcaatggtcttcaaaccaagccctgccatgcttgtacag

SEQ ID NO: 59408 - DNA, 1712 bp, Homo Sapiens
cccgcatctgcaagggcgatgagggtggagagcgggtgctacagcagcgctggacctccttcctcaaggcccagctgctgtgctcacggcccgacgatggcttccccttcaacgtgctgcaggatgtcttcacgctgagccccagcccccaggactggcgtgacacccttttctatggggtcttcacttcccagtggcacaggggaactacagaaggctctgccgtctgtgtcttcacaatgaaggatgtgcagagagtcttcagcggcctctacaaggaggtgaaccgtgagacacagcagtggtacaccgtgacccacccggtgcccacaccccggcctggagcgtgcatcaccaacagtgcccgggaaaggaagatcaactcatccctgcagctcccagaccgcgtgctgaactttctcaaggaccacttcctgatggacgggcaggtccgaagccgcatgctgctgctgcagccccaggctcgctaccagcgcgtggctgtacaccgcgtccctggcctgcaccacacctacgatgtcctcttcctgggcactggtgacggccggctccacaaggcagtgagcgtgggcccccgggtgcacatcattgaggagctgcagatcttctcatcgggacagcccgtgcagaatctgctcctggacacccacagggggctgctgtatgcggcctcacactcgggcgtagtccaggtgcccatggccaactgcagcctgtacaggagctgtggggactgcctcctcgcccgggacccctactgtgcttggagcggctccagctgcaagcacgtcagcctctaccagcctcagctggccaccaggccgtggatccaggacatcgagggagccagcgccaaggacctttgcagcgcgtcttcggttgtgtccccgtcttttgtaccaacaggggagaagccatgtgagcaagtccagttccagcccaacacagtgaacactttggcctgcccgctcctctccaacctggcgacccgactctggctacgcaacggggcccccgtcaatgcctcggcctcctgccacgtgctacccactggggacctgctgctggtgggcacccaacagctgggggagttccagtgctggtcactagaggagggcttccagcagctggtagccagctactgcccagaggtggtggaggacggggtggcagaccaaacagatgagggtggcagtgtacccgtcattatcagcacatcgcgtgtgagtgcaccagctggtggcaaggccagctggggtgcagacaggtcctgggctcggacccaactcctggacctttccagcctgtatcaggctgtggccacacgagaggacagcgcgagctcaggagagatttcgtgacaatgtacgcctttccctcagaattcagggaagagactgtcgcctgccttcctccgttgttgcgtgagaacccgtgtgccccttcccaccatatccaccctcgctccatctttgaactcaaacacgaggaactaactgcaccctggtcctctccccagtccccagttcaccctccatccctcaccttcctccactctaagggatatcaacactgcccagcacaggggccctgaatttatgtggtttttatacattttttaataagatgcactttatgtcattttttaataaagtctgaagaattactgtttaaaaaaaaaaaaaaaaaaa

SEQ ID NO: 59409 - DNA, 513 bp, Homo Sapiens
gggaaaacggaaacgacaaaagatttggcaaaagctgtagccaaacaatgtgttgttttcgactgccctgatgggttggattatttggctttgggaaaattctttaagggactgttatcttgtggagcctgggcttgctttgacgagtttaacagaattgatttggaagtactctctgtggttgctcaacaaatccttactatccaaagaggtattaatgcaggtgctgatatactgatgtttgagggaactgaactaaaacttgaccccacatgtgctgtctttataacaatgaaccctgggtatgctgggcgatcagaactgccagataacctgaaggctctctttcggacagtagcaatgatggtacctgactatgccatgattgctgaaatagtcctatactcctgtgggtttgtcactgctcgaccactgtctgtaaaaattgtggctacgtatcgcttgtgttcagagcagctgtcatctcaacatcactacgactacggctgagag

SEQ ID NO: 59410 - DNA, 155379 bp, Homo Sapiens; identical to SEQ ID NO: 24170

SEQ ID NO: 59411 - DNA, 2737 bp, Homo Sapiens
cgctgcggaggacccagcgcctggaacgtacctgcgcctcagccgccgcgcgtttgctccggcccgactcgcggcctcggcgccctcccggccgattcagcttcacccggcccagtcggctgctgccttgctgtgagtttccgtgtttggttgcctaaggaggatgtgattttacttttttgctgttttctttttccttttataatttgaagaggagaaaagaactccgctgagcaggcccgggacgcgaagtgccaccagctaccccaacaaggacgtctccaggggaaagggagttggaagcaaacttggtccagctggcgttgaggtctcaacttcggctggactcttaaatcctggggtcatgcccttcacgctaggcaggtggaagtctttagttgtactgggccggacttgagcccgacccttcgccagcatctccccgctgccctcaacacacacacacacacacacacacacacacacacacacgcggctacctcctaggcccggacacctgtctgcagcatggataagtatgacgacctgggcctggagcgagtaaattcatcgaggacctgaacatgtatgaggcctctaaggatgggctcttccgagtggacaagggtgcaggcaacaaccccgagtttgaggaaactcgcagggtgtcgccaccaagatggccaaaatccacctccagcagcagcagcagcagctcctgcaggaggagactctgcccagggggagtagaggccctgtcaatggagggggccgcctgggcccacagcccgttgggaagttgtgggcagcaagctgactgtggatggtgctgccaaggcctcctcttgctgcctcgacaggggcacctggggcagtcaccaccctcgctgctgggcagcccccgtaccaccgcagagcagatccaggccatacctgcatggcacgaggcatggcagccaggactgtggttccagggagagcctggacgacttctgagatgtctgctttccaccagccaggcccctgtgaggatccttcctgcctcactcatggagactattatgacaacctctccttggcaagcccaaagtggggtgacaaaccaggaggagtgtcccccagcatcggcctgagtgtagggagtgggtggcctagctccccggggagtgacccaccactgcccaaacctgcggggaccatcccctaaatcaccgacagctctccctgagctccagcaggtcttctgagggtagcctcggtggtcagaatagtggcattggtggccgcagcaggcagaagccaacaggcctttggtccactgcctcctcccagcggtgagccctggcctgcttccccaaacttggagaacggagcaccagctgtggggcctgttcagcccaggactccttctgtgtcagcacccttggccctgagctgccccaggcaaggaggtcttccaagatcaaactcggggctggggggtgaggtttcaggtgtgatgtccaaacccaatgtggacccccaaccctggttccaggatgggcccaaatcttacctttccagttctgccccgtcatcctccgccagctggcctggacggttcacagcagggtgcggtccctgggctggggcgaagcctggctgcacagaccttggcactggtcccaagctcagccccaccagtcttgtccatccagtgatgtccaaccctgcctgagttatcttgtaaagagggtcccctgggctggtcttctgatggtagcctgggatctgtgctcctggacagccccagctcccctagggtaaggctgccctgccagcccctcgtcccaggtcctgagctgagaccctctgctgctgagttgaaattagaagccctcacccaacgtctggagcgagagatggatgctcacccgaaggctgattactttggagcctgtgtgaaatgcagcaaaggggtgtttggggctggccagcctgtcaggccatggggaactctaccatgacacatgcttcacctgtgcagcttgcagccggaagctgagaggaaaagccttttattttgtcaacggcaaagtgttttgtgaagaagacttcctgctatccggtttccagcagtcggctgacaggtgttttctttgtgacatctgatcatgacatgatcctgcaagccctggggaagtcctaccaccccggctgtttccgctgtgtcatctgtaatgagtgtttggatggggtcccttcaccgtggactcagagaacaagatctactgtgtccgagattaccacaaggtgctggcccccaagtgtgcagcctgtgggcttcccatccttccacctgaggtaagatgcccttccaaacatgctcccaggggcttctaagacatgaatatctccctgggctcatttacaagatccatgtcctgtccttacagcttttaaggtatccttttaaaaatctcaactcttgcctggtgcagtgctcacgcctgtaatcccaccccttttaggaggcccaggcaggaaaattgcttgaggcctggagtttaagaacagcctgggcaacatagcaagacctcatctctacaaaaaattgttaaaaatttggccaagtgtggtggcatgtgcctgtagtcctagctgcttgagcccaagagtttgaggctgcagcgagctatgatggtgctactgcattccagcaggtgacagcaagaccttgtctccaaaaaaaaaaaaa

SEQ ID NO: 59412 - DNA, 2622 bp, Homo Sapiens
caggtaagtggtgttataaatccctttaaagagggaaaaactctacaacaaaaaagaacattcagtcataaataaaacatactgactggattttcttagcttttgtttcgaatgattataaaaccataatgggcattatatagtattacataatgttaattatatcgttgaggttatgttgagctgctaattccattcacttaaagaccaaatgtagaagagtgaacatctgtaaagttaaggctttttaataacattatgaacttgatggttacatgtaagggttatcttagaccaaatcaattagaagcaaatggaatcaagttgtttatctgtaaatatctcgtggttttggaaccataatattgatgacatactgttgatgctgtatgccggagtcattcctgtctgtcatccttacatttttcaagacttggggaaattatggataataaatgttctaggtgggtctgtccaggtgtttttgatctttttaccaatgttgatttgcctcctagcagctttcaatttttattttcatgacacttcagcaatttttttggggaaaaaaaacagtttcaaaattccaggctttttttttgtttaattttgcatgtttctttctgcagaatcctaattttttttccttttttagcagaccgtgacaagagttggaatatttaatattttaaattaaatagcattttaatttgtaactcattatacaatgtgtcatcaagatttagacatgtaaaatgtatatcctattttctcatatcagacaagcatttttcatcctataattgataatcatataattcataataattcacatttggtctataaacttcatggtgaaagtaagttatgaaaataactttatgattattcttcattagctaaattgttcttcttgctccttttgaccacagttatttgatgtgatttgaatcatggtctttatagtctcctcattttatttcatccccaaattacatttctttgttgttctattttttttatgtaatttggaatttttcctagaatttccagtttcctttgattaatcctattttcatcatgatttctaagttcttatttggaataatgtttttgtttttatttcacattctgtgattcttatgaatattatcaagatatgaaaggtttgtcactttagatttctttgtcatagagtacttttaaattttgtgtatttgagaccagcctggccaacatggtgaaactccatttctactaaaaatacaaaaattagccaggcatggtggcaagcacctgtattcccagctactcaggaggctgaggcaggagaatcacttgaacccaggaggcagaggttgcagtgagctgagatcatgccactgcactccagcctgggcaacagagtgaggctccttctcaaaaattaaaataaaataaattttctatagttttgggattgatcccactaaacttgggaacaaattgctgactctagagtagactggcacactatagtgacctgatagacaccaatgcgttcatcagatttgtgtctttatttgagctggttcatttcgggcctttattttaacaatttaaggtaatttcagatttggttctgtaattctggtttctataatttttattgtgtgaacattttttaggggcttctacaacatttgctaactctacatcaggataataaaaaataactattgtgtttgtttttgcattgaaggtcattaggtgaatttacctacctttaaacatcttccatgacaaatggttatgtttatttaggcaatttttttaaaaacctagaattaccagtattagttctctgctggagttggacactttaataaatggtaaaacttatcccattcgtacctaaagggcaaaatcagatatccaaatattttatttattttctctgtgatactgtaagttaaataggatagccatgatatagcatataaagccttcattaatggctgggcatggtggctcacgcctgtaatcccagcactttgtgaggctgaggcaggcagatcacttaagctcgggagttcaagaccagcttgggcaatatggcaaaaacccatctctacaaaaataaaaaatagtggccaggtgcggtggctcacgcctgtaatcccagcactttgggaggccaaggcgggtggatcacgggaggtcagaagttcaagaccagcctggtcaacatggtgaaaccctgtctctactaaatatacaaaaattagccaggtgtggtggcaggcgcctgtaatcccagctactcaggaggctgaggcatgagaattgcttgaacccgggaggtggagattgcagtgagtctagactgtgccattgggctccagcctgggcaacaagagcaaaacttcatctcaaaaaaataaaaaataaattaattaattaaaaatagaaaaattagctgagcatggtggtgagtgcctgtagtcccagctactcgggaggctgaggtgggaggattgcttgtgtccaggaggttgagactgcactgagcagtggatgtgccactgtactccagcctgagtcacagagtgagaccatgtctcagaaaaaaaaaaaaaaaaa

SEQ ID NO: 59413 - DNA, 693 bp, Homo Sapiens
  misc_feature (529)..(529): n is a, c, g, or t
  misc_feature (597)..(597): n is a, c, g, or t
  misc_feature (627)..(627): n is a, c, g, or t
  misc_feature (651)..(651): n is a, c, g, or t
  misc_feature (655)..(655): n is a, c, g, or t
  misc_feature (666)..(666): n is a, c, g, or t
  misc_feature (678)..(678): n is a, c, g, or t
  misc_feature (681)..(681): n is a, c, g, or t
caatggcaacacagatttattgggagaaagacctgcggagagggggtaccagctagtgccagagcccccttcccgcttacaggctggaccagttacagtcccgggcaggagaggtctgggattgttgtgaaaatggggtgggggcggtgtgtttggctgctgataatgaaggaatttagtgcagccaggggttaggcctgggacctgcctgacaggatgtttctcacagctcaggccctggtggaattttccactctgaccagtttgtaaaatggtaggggtctgcaaaatagtgcagtttgggctaacattcttatttcttactttagtataaaaaggaaaaagggcgtcgttgatcatctggctgcttcctgctggataggggcgttgtgattagggcctgggttctggagcttccgaatggtttcctcgtaggctctggtattagacgtggcaaaggtgaaatatattatcaatgtgtttttgcatgcttgcctggataaaacaattcagcctttgggaaatgaancgggatacaaggttaaatatgcatggcccaatcattagtaacaggaagaggaagatcaggggtcctangaagggggcaacccagggtatccatcttanaagggatgatccttgccccaggantcancgacttgatgncaaaagcttttnaanccctgtcatgaa

SEQ ID NO: 59414 - DNA, 2705 bp, Homo Sapiens
ttttttttttttttttggtggtttagccaagagctggctcagctggacagcaaggcttctggctaacgcagcatttttggcagcctaagctgttcccagggcgcttagcacacagatcttggccttcaaaatgcagactttggccctcagaatgcatgctccctggcactgttactaggcttggagatcccctcataaatttcttcttatttagggaaattaggtgttccctggtctttcttgggctgacccataagtatgtaacatgtcatcaataccatctatgcttttcaaccaacttcaaatcaaagaaacaggttaccttcagactgttaagtatgagagatcaaatctttcgagcacagtaacagtgccatgtgaagatgttgtgtgcaatttgcctgactctttttgacttagaacagaattggccatagttacagcatagagctttgctgctgcagctgctactgctgctgctaccagtactacctctattactactgactgatgtttattgcagacttactgtgtaggacagtcttttaaattctttccaggaatttagtcttttaaattttcaacaaccctaggaggttgataatattattatcaccattttaaagatgataaaagggagatgctgagagatcatgtaatttgcctggtcactctgagagtggatggatagtgtttcattgtattggtctcggtgagaacttattttctttttatgaaaaattattattatttcttgggacagggtctcactttgtcacccaggctggagtgcagtagtacgatctcggctcactgcaacctccacctcctgggttcaagcaattctcctgtcgcagcctcccccgtagctgggactacaggcacgtgccaccatgactggctaatttttgtatttttagtagagacagggtttcaccatattggtcagactggtcttgaattcctgacctcaggtgatccacccaccttggcctccaaaagtgctgggattacaggcgtgagccactgcgcctggccaacttttctccttaatgatatgcgtcattcattcaataaaaatttagtgatcatcttctatgtgccagctatatcctagaagttggagatatattatagtgaatgaaacagtatagatccctgctgtgatagagcttacattttacagggaagaaatatacaagcaagtaagcaattaataaagaaaatcattccagttcctgacagaaaaaacacagtggtatgataaagaacgattgcattggagaagctgctttagattagatttgattggcagggaagtcctctcataaccaagacctgaatggcaagaaggagcctgccatgtaaggatctggggagagaatgactcaggtagagaacaaaagccaaagccctctgccattcaggagtttggtgtgtccaggaacaaaagagctatgaagagaagttcttccaccaaacatacaaaatcaggatatgcaacttctagagttcccatctggaagtaataagagaatgtatcaaaacatgggcacttctggtccccaactttcctctcacacccctccaacctcattttgagagaacaattcacattttaatttttgatggccattcccaaatggtatagtttgtttgttaataatgactttattgagatacaattcatagaccataaaattcgcccctttaaagtatacaattctgtgattttttaggatattcactgttgcataaccatcactacgatctaattcagaatattttcatcattccaaaaagaaactccgagtttaacaagatttcttgagatcaatatgcaaaaaatcatttgtatttctctacactagcaatgagcaatccaaaaataaaattaagaaaacaactccatttacaaaagcacaaaaaataataaaatattttggagtaaatttaacaaattaaatgtaagacttgtacattgaaaactgcaaaacatcattgaaataaattaaaggagacttaaatgaaaagacatcccatgtgcatggattggaagatttaatattgttaagataatgcagtaaatagaataatggtccccaaaagaattctatgtctaatctccagaacctgtgaatatgctaccttacctggcaaaaggaactggtagatgtgataaagttatgaagattatcttgggttatctacatggacctaatgtaatcacaagaatccttatgaaggagacaaaaaggtcaaaggcagaagaaggaaatgcgacaaagaaagcagaggttggaatgatatactttgcagatggaggaaggggctgtgagtcaggaaatacaggctgcctctagaagcttcaaagacaagaaaatgaatactcccctgcagcctccagaagtacagccctgctgacacctttattttagccatataaggcacattttggtattctgactcccagaactgtaagataataaacttgtattgttttaaacacccagtctgtgagtttgttacagcagcagtaggaaactaatatacatgacaatagttcccaaattaatctacaaattcaacacaatcccttgcaaagtcccagctggcttttttacagaaattgacaaactgatcctaaaattcatatgaaaatgaaagggagaagccaaaacaatcctgaaaaaaaaaaaaaaaaa

SEQ ID NO: 59415 - DNA, 1665 bp, Homo Sapiens
atatatgtaaaactgattgaaaagcattaagaacaactaattgccaatttgtatttgggctgtttagttgatcgttgtagccttgtgtggcaccaggcaaagactaagccacaattctgttggttgaggaaatatttaactggaagatgcttttgaatgaatgatcagctacccaggtactatttgacatacagcagtcttggggcttccatgacttattctcctatcatctgtttgcatgataaaattacaggtttccatgtaatctttagcagatgtatttgctatgatcttggaagacagggcatagcttctctggaattaagggaatggcccaggaaaaagaagaggtgcccacagataaaatggtcagttatttttatatatgtgtgcattcttctgtggtgtgcagaacaccaaattgcttggacctgtttattcccacagactcacagtcaaactggtcctgaatattaaatctgatggtttcattctcctgataaaaatcctttgtcgataaaaaatcctttgtcaagtctcctgaatgctagctaggcatacgagatccagcattattgcccctgtctacctctgataccattccgtgctatccctcaccattcatcctgtgttctagcaggtgcatctgcacacgcttgtttgaattctatggaaccagagatgtttgagcatagagaatgaccagattttaggcagttaatactgtatatatacaatataatgcataacactgccagtgaagtttggagcagcacctgtaatcgtgcatactaatatctctacagtaaaacatatgaatattcacaccaaacaggttaagtcagctttaaatggcttgatccattcagatcagattttaccatcaaatgaattgtgaaaagacttttggtatttgaaatgctttgggttgaagaagtgtggtagacctgtacttgcttttcttgaaaagagcctgtgctctcttattcatctggcctttgggcatgttgttttccctgcctggaatggccacatctccctctgcctgttgagtagcatcattactagaatcatcattgcatatactgaggatttactatgttgttactcccagcaaattctatggtcgggggggcgggggggggtgttcttattgtattacatccccccagtgtttagatgaggaaactgaagcttggagaggtcacagagctaggaagaggtagagctgaggttgaaccaaaaagtatggagacaacaaaccttgggttcttagttactacactgtccgtgtgtgcgtcttccccaaaggtccagttcaggtgtcaccttcctaaggccctcttcccttcctccaccacgtttaatagattatgactcctctgggccttcacagctgtttatgcatagctgtggtgcactgcttctcattctctgtctttcccatgggcctaaactccttgagtagttggggaaaaatgtctacttcagtgttctatctctagggcatacagtaggtagtcaacacatagtttataattaagttagtttaaagtgatacggtaacagataacaatttgtatcatcattaaaataaatagtaaacaccaaatcacaagttcaaggatataaaatttggatttacaaaaaaaaaaaaaaaaaaaa

SEQ ID NO: 59416 - DNA, 3204 bp, Homo Sapiens; identical to SEQ ID NO: 24217

SEQ ID NO: 59417 - DNA, 203010 bp, Homo Sapiens
gaattctttttcactgtgaagcagtacaaattcatgactttgctaacaatctatgactgctgagcagtaatacagctaacacttactgagcacatactatgctctagaagtgtgttgagcatttcacatgtatggttttacctgaaccttagaacaatattatgaggtaggtgctatattattatctctgttttacagatggccaagctgaggccaagaagagtaagtaatttagagagatccgtagctgataggtggttgagcccggatgaaaacacaccccaaagcccatgcacctaacaaactactcgatttgggaaaggtattaggtgaggtggaaagcaaatagggtgggtgaagcattgttaggtcagatacctgaggataaagtggggaaagggtaaagggaggaacaacattcttgccgacagctgaagctccagtccagaagcagtaactgagggcatggaagtcagagccacagaaatcagtaaataggggaaagagaaaggttttcctaagggaagaaaaggaattgacatttgtttgaggtgtgactggagaattggaaatggcaaaacaagagtttctgagcatgaaggggtgagatcgtgagaaatgaaatcaccctgaagaactcttggtgaaagaaaagcagacccctagtgagcagatggacatgtaaaactggcgacggtttgggttgttcctttactgtgttcattgttcacctgccttcaacatttcatcagacactcccttcctctggaggctagcatctgttttgcttttttttttttttttttttttttaaataggactgagcattcaactcttaggcacttggttatatatagtacttaggttattgaaaagagggccgagtgtggtggctcattcctgtaatcccggcacttttggaggccaaggcaggcggatcacctgaggtcaggagttcaagaccagcctggccgacatggcgagaccccgtctctactaaaaatacaaatattagctgggcatggtggtgtgcacctataatcccagctacttgggagactgaggcacaagaatcacttgaacccagaaggtagaggctgcagtgagccaagatcgcatcactgcactccagcctgggtgacagagcgagactccatctcaaaaaaaaaaagctttttctttgtgtaggaattgtctaatcctgaaaaatactcttttcatgaatcatcttcttccacaggtgagtgcttagtaactctttgtaaatgtagataccatgatctacctcaaaggtacagcatgcattattaatactctaaagtggatcatctgaactcgtactttacaggtgtaggtgtgtatatttgtggtaaatctgaccaagaatattttatacaatactttcatgaaaagcattatatttgccatattgtcacaagttcatttctatccaccccaaaggttcaatccctgaagcagttaagacttgtacagaactcaaattcaaatgtatataatcctcagcctgatagagctatattgttctagctaaagtattcagtatctctttcgtgcccaccactgtttcattatcttgtctgatgatcttgctttatgtgaaatctgtgcaatacttaacagtttgtgtaaaaacatcaaaggatttttaaaatttctgttttgttttgattgtatatattatcaaactgtgatctgctttacagagcagaggatcaaaactgtaaatcaaaggactagaatcaattattatgaaaatctggactatataggacttcagaaaactggttaccaaaattttggctaattttgtaaggacttttttctttttttgagacggagtttcgctcttgttgcccagctggagtgcaatggcgcgatctcagctcaccacaacctccgcctcctgggcttaggtgattctcctgtctcagcatcccaagtagctgggatttacaggcatgtgccaccatgcccggctaattttgtatttttagtagagatggggtttctccatgttgcttaggctggtctcgaactcccaacgtcaggtgatctgcccgcctcggcctcccaaagttctgggattacaggcgtgagccaccgcgtccggcctttaggacttttaaaataaataatttttatctttttctttctttctttttcttttttttttttttttttttttttagacaaggtctcactctatcgcccagggctgtgcagtagcatgattgccggctcactgcagcctcaacctcctgggctcaagtgatcctcaccttagcctcccaagtacctgggactacaggcacacgccattacgctggctaatttttgtattttcttttttggtagagacggggcctcaccacattgcccaggctggtctcaaacccctgggctcaagcgatcctcccacctcagccttccgaggtgctgggattacaggcatgagctatcgtgcccagccaaagatatattttcaaaagacacttgtaaaattagggaagtgcaattttaaattttttttttctgaggattctctctattttgtcattgaaagcaaagacaacattttaaaagtggacctacgtaagagggctgggtgtagagctttattaaagagtgctgtgctgtttgctgtttatactttgctcattctctgatggaaaataaattgtttaggtaccccttacatgtccttcagcctctcaccgtttgagtctggtttgggttttgtatactatatgaaacagtgtttgaaataaaggttcctaatgaacattttcctccatgggataccaatcaactgcctgcttttaattgataattgggcattaactcctcagtagtgccatcatcataaaccacagtgcagaccctatagtccaccattgaaaaattaagacaattatgcagtatttgaacatgtctaatctaggagagagtagcacccaaggccgggcacagtggctcatgcctataattctagcactttgggaggctgaggtgggagaattgcttgagcccagcagttcgagaccagcctgggcaacatagtgagaaccccattgctacagaaaaattttaaaaacttagctgggcatggtgacatgtgcctgtagtcctagctactcgagaggcagaggtgggagtatcacttgaacctgggagatcaaggctactgtgatcgtggcactgtgctccagcctgagtgagagagtgagaccctgtctcaaaaaaataaaagaatagtgccctcatataccttagtggaaaaaatgaccagatctttggcaaagtatgattgctaaaataataacccactcagcttacactccatgtgtttccaacagagagggatacgcacttgatagaaacagaaaattataatcaaatagaattcttctgttggcagagcatacatatttatacattcttctgtgtttagctcagtggttagagaacacttcctggaaagactgcagtacacaaatgttttcaatttgagcttgtacatttcatctcattggtccctgagacaaggttcactgccctggaggtgacttggctcagtctttaaacacacactaatgaatttcaggtttgggacagaagaagggctgctctctattggacagtcatgtgaacttgtttcccctgtatgtctaacttaggtatgtaatgtcactctggatagagggttcttctactatgtccggacacagaaaactgattgcccttgctcagagcactccatgcttgcctgtgtttaaaacttaggtttggcagattccttcatttttgtgaaaatagggcaaagatcttctgagtgcaattggatgtactggagggcacttaacctttagcctgtaaagatgggtttgggctaagtctgttttgtttttcctttcagctgtttgaagagaaaattcaaaggaaaattcatctttcatactttttatgctgatagttctagtaatagtttagggattttatctcatctgctccagcaacaccccaccagaaaaattatggaagttgagtagccgaatatgaaacttgttttatatagacaggaaagaagctaatgaactcacagacaccccttatcaggactacaaagcccgagctgtgtattacccccaccccaccccacccggcgtacctttggcagtgcttacaaagacttgatcctgactagcttagaagacagatgcagttactcagctttgtacatgccttgcctatatactcaagagtgggtcacaattgtgctgggccagcagcagggggaaatgttgatttcatgaattccttcatcagtggaaggtcagccatggactgtaattttgttatggagtgggagaatttccatttctgtgtgatgctgcatttgtcccagttatgccatttatcatctgcaaggctgtgcacagcctgtgcaagcctcctgtctggactgcggttcttccttcccaatttaagcagcatgggccagatgatctcctaaggccctttctacctttcacagtctgaagttcagcttcttctgcatatatgaggttggggcaccaattgcaatggtcagctggagactatttgcattatccagctgataaactcttccagcagacaaatgtgaataaacagcaacactcaagtcctgcataaagtttgtcttgagtttgctgaaatgatcagcagaaatcttgggcggtgaagtgctcctaagtgctgggcaggagttgtcaggtgacggtgccctgtcagcgctggatgcttactaggggtggggtcctgcttgagatcctgagttagctgcaggagatgggtccagcatgcagttgggcatcagaaagtcttggttcctccaggctcctgactgtccctatcaacccagatgtcctagcctcataggctttggcgagttaccttgcagttctaaagcttctgtttggtcatcttttaaatgatgataataactacttttcagggtgaaaagcttaaagtatgtgaaagtatctagcaaatagatggcgctttataattaggtgactaaaaacagcaatttgtaaaaaccccaaataagataaccttatctgaaagaggggctcaaaaaactgacatttgtgtgtgaatgacattgcataggacatactgtcctttaatccttaacaacctcattttacagatacagagataccaggaagttcccagggtcacaacacctggaaacaatggagttgagcttcaagtcttctgattggaaacttgtgttccttttacaatatactaccaatacaccaatatagttagtacattttatagttaaatttctgatgattctggaaagggaaataaatgatcaaaatggtaatagtacctgttttgatagaggagatttccttgtgccctttttatatgactacagctaaattgccctttaagacaaacccaggaaaccctagccagtcactcctcacgttgtgggatcttaaccccgaaacagctactggggatagctggaagatttgaatatctctgggatgtcactgtccagtttcgaaataattttataaatgggtttcttccaggaaggatctgagtctctccctgcggagacagccctgaagaactcctgtaacgtcaagctggcaatttccaagaagcaatctggaacctgcatttccaaagagacccacaagaaagaaaagacgtgaggttgggaagcactggtgccagagccctcactagcgggtgctgcctgtttcttgggtagtgggctaggagcatccctgctctagtggcccctgattctgcaaccctaggactcctctgcttcctcatcagacacaaaccttgataagacagctccagtgagaaagccctgggagaaggtgaattaaggacacttcctttgtaggaggagctgatctcgctaatgggcgactttttaactaagcaggtcagaaaatcttactgaaagtaaatctgtggctcaaagagacttcggtattcttttccctagtactaactgtggaaaggagtgcccccaagcttctgactgtcatacctcattccactgccttttagggctgggtctgaagagcttacactcctgctttcagagctggttgacgggggtgctgttctagaatcctaacccagactggcaccatgaatgatgggttgccccactgccaagctccagacccagcttggcttggggcttgctgccactgcaggtcaaatgaccaccctatgtggaaagatgcagcagtgctgcctgtcccatactggccgtgaccccttgagcctcagaaagggagacatggacaattttccccacaggtagtcttagctttccaaacatactctgactcaccagtcaaccagtggatgaccacagttcttgtattttttggaggtatcaataaaccactctttgtgatcacagtcaagggagaagtcaagaagagggaagtgtaatctgtgaccagatatacccggcacctgcagaatcagatgccagcctaacagctgtcagctgtgcatgaggcaacatgcatctcttgattaggaatgtgcgccagtgacacctaggctcacctttcactgacgctttacctctgaggtgccaccagtgtgccttcatagggatccccgagggactgagcttgagtgttgtttattgttatttccagaaaggatttgaggtgacttgctatggaaggcccactgatacattttcaagggaaaatacagataagaatcaaatcatgaaaagcatagaaattgttgagaaaacctaggccaagactaggtgccacaactgagctcagcattcagtcctgagcctcctggcactaaggcaaaaaggtcaggaagttatgtaacttgataatgacagggtattcagtctaagatggtgtaacacctggcagccctctcactaagcttcagaatgaagactggctgttgactcagtttgctgcttccacctgttgcccaagtgaagatgttgaggctgtaatctttgtggatgatacagagattggcccaggctgccctggctctcagtaacttaaggagacacagaagagggatctttcctaaaactcgaatcatatagggaagacactcatcagatctcatgggaacccagtacatggtcttacctcaaagtcatttcccttgttgtagtgcatattgagagcttgaaaaagttctgaattgcggagaaccaccagcattttgggatttgtgacaccatctgaaattgcttgccgggcagatttttccatttggatgtaataaaactcacgaaagttgctgaaccacttgatcatctgggaggtaatgcagcggttgaactgtacaaacaagaggtccatccagtcagacatttgccacgaggtgctcagaattagaactgtctgcttccagctcagtataggggttcatatacggctttaaccagcattaacaggggcttcctttaaaaaaagaagcgaagccaccgctattttccaagcctatttagttatactcagaaaaatctaaattagctacagtgcccattagaacataacttttttttgatatgctagatttatgggggttgttttacccatgaaaagctttttgtggtgtttgagtgggacttaggggtcacgaccagtgtggtgccagattttgctgcacccaggtggactgcatggcaggcctggggccttccacttggataaagggccaagggaagggcaagatgtaggtcagggagcagtttattagcaactttgaattgtggaatgaattgaaatcaaaatcagaggttgcttcagggatcaaccaaccaactgaatatgagggaaagaaaagcttgaatgatgtagaccaaaagtattaacagcccctaacccaacacccaaagtaaaagaggccctcagaaaccttttatgggaacaggggaggtctggtcccaacaattagtttgattttccttattgtcacacttcatctgtatgtactttcactcagttttgaactatagcaatttgaacataaatttgacagtgtctgacactctgtctctctctccctctctatatatattttttgttgtttgtttgtttgtttttgtgtgtttttttttttttgagatgtagtctcgctttgtcgcccaggctggagtgcagtggcgtgatctctgttcactgcaacatccacctcctgggttcaagtgattctcctgcctcagcctccgagtagctgggattacaggcgcacgccaccacgccagctagtttttgtatttttagtagacatggggttttaccatgttggtcaggctggtctcgaactcctgacctcaggtcatctgcccacctcggcctcccaaagtgctgggattagaggcatgagccactgtgcctggcctatattttatttttcatagtgtccccagccaaggcagaaaactagccaaaaaggccactaactagtgtttctgtttccctctacttttcctgcccatgtgtttctgttttggggattatctacagctcagtagcttaagaatttagacagccagcctttctagcctaaagttattcacggttatttgggtagagtctcagcccagaactggacattgcttccatcagcaacactaaggggagcttgaagtgcacatatgatgacctaggacttgcctcacaccaggcaaaacacactgcctcttgggagttctgcagaagctgccatttagttgagtgactttacctgaacatcaggaaaataaaccttcaggaggttggagctgggatatcgtgtgaagaaaaacattagtttggccttcttcaagtgaccagggtttagaccctcctggatttatctcagtgtcaaggaaaatgaacactttaaaatgccagtttatcaattaactagtgaattccttgttcctgtggtttctatttgatttcattttgtttttctgattggaattgtgtatttgctccatttttctgtctctggaaactctggtcaaataagctggatgacatatgtgcacagttaagtcacagaatgtaaaaatcatctcgatgtggaaaagttatgtagcatagatgatgtcaaatacaggttggtgtattttgtgtgtgtgtgtgtgtgtgtgtgtgtgtgtggtgtcttagatgtcaaatacaggttggtgtattgtgtgtgtgtgtgtgtgtgtgtgtgtgtgtgtgtgtgtgtgtggtgtccaagtgggatgggaagagatggcaattctatcccagataaaccatttcaaaaccccaagcagagatttacttcccctctctgcctcagtttcctcagctgtaaaacgagaagagtaaactaggtggtccccattctggctgtcactcttatcattgccttcacagtgttgcctttataaccagcaaacatctaagcaggctgaataccagctcatattttgctcttgctcaagaagcttgaatggttgggtggtacccactctccatttgcctggcagaactatccctcatctttcaggtctcagctcagaagctcccacctctgttaaacccttccttgccaaattaggccttccttaccctgggctatgaagactctttgtacaaactgttgcagcgatgaccttattggaatttttactgtatgtttgtctcgtctagactgtgagctccttgagagtgaggaccttatcttttcatctttgtgcctagcccagtgctaggaacatagcaggtgctcaataaatatttgttgtgtgaaggagtaagtgagtgaacggtcaaccttaatccatacacatatatggaaattagattccaaactatacctcactctgggaacagacagattccttcccctttaacaagagtcggagaattgtgatgtgactgcctagcactagggcaggacggaaatgaaaaaaagatttacacaaatacgctttgcatttttagggacagtccttaggctgggtgagaagcattacacagagtaacctgggatctcagatccgagagctgtagcttaagacagtgaagacttccacataggatgaatctgtttaaccaaaagaaaccagaccaactgactatggttataggtggcccaggcacctagttgctgcacaggagatccctccctgctgccccatcagcccctacttacccttcctacagatccacaaatgctgtggagagaatcctggattgggattccaaagacccagtttcagacactgattttgccatctattagctgtgtgaccttgggcaagccacttaactgctctgagcctcattgctaagatgtggagtatagtggttaaagcttgtacttggccatcagatcccgggtttaaatcctggttgctcattagtgtgtcttgggactttggacgagttagctcccttctctgtctctgcttctcggatacccgatcttagagtggatgcttgagaacggtgagataatacaggtctaaacccgttatctgaaatgctgagccaaatggagtttggatttcagaatttgttagcttataaagataatacgatgtgtgtaccacacattaattaacatccacagctgagacagtgtataatccaatacattaacatttctgcagcagaacgtatgactatactaagtgggataaaatctattaatagcctccaatcagtgcaagccaggttttgctaccaaaaaaaaaagattgcatcattcttagggggggaaaatcatagggcctgtcaaagctttatgggtttcagaattgtagctaagtggtggtgggcacatatgtgtgaagtgctggtagcaatgcctgccaccgagaaggtgttctgtcaatgctcccctcgtgatcttcacatctgccctacctatgtcacaggatgtcatgtgaatgtgaacgttctttttatgctgtaaagcagcttgctctcaggtggctttcatggcccacaggaataaatctcttggaatataggcagcaggaatgagggaagagttgaggggccagggtgctgctagggggtcccaagtcattccaaagatagtcaagtacttcacccatgcagccagtcctggcttaggtatttcttaggataggccccaaacctccagaagctctctgagcccaatccccaatttagggggcaggaacaggcacatgtaggtgctcaacaaatagcaaattctgggagactgaggtgtttttgcagctgtctgaatttaatggagagtcaactagtggttatcaaaggcccagacaggtagcctttcttataaagaaaatctgtctatggtggaatctctgcctccaagagtggtggcaagtgaagtgttctcagcattggttttacagttgctcgctaacttccaggaaagctttggggtgtttccaacacttttgaccggcagggggcgctcatggcatttaggacacaaaggcaggttctggcatggtaatgagctggtcccaccccatcctgctgccctcacagtagttgccaggcaaaggacacgactgttcccacctggatatgcaactccatagactcatcagcttctggagattcccctcaaagctgcacacaagaagcagcagcgtgagcacagctagcttaaaaagcaacatccaaaatatattctcaagaacttaagttctgcaagatgcttgttagaagtggtcatatgggtttggggctgtgtacattctcctcttagagcttccatttactcatgttaaaggctctgagaattcctgcagaaaagaaactatctcagtatttccccaaggtactttttcttctaactcaacaattattaatatcccgagggttactctgggaaatacattaagagagtagtgtctacttaagggttgcaaagatgatgcaataagatccagagccctgcagatcagcctgggccactcaggcctcctcatggggagcctcctctcccttcatatgcccagcccctagtctccaggcactccattgcaccttggaagttgttccttaaactggagacctctggccgtttccagccacctctctgggtttaatccccgaggaaaactccttttccatttggcccagaagtttcttgttcctcatctgctccccaggaattatctacacaatataggatttttgcttgtagagctatggggttggggaggccataccttagatgacgtcattcctttgaccctctcctcctaagtttatgggtggctgacaaccaaattatggattctttcttccttagggtattcattgtatttcagaagcctatttgagtctcaaaacaaaacccttttagacccaaaggaataagtcaagtggcagaacccgatgggtcatagaagaagctaagtgaaccttcccaggtccttaaattccagaatgtggtcaccactataagctgaaggcccagagcaacattaagaagaccctgagtgatctgtccccagctcctcttcaacttttagttttcttgtttctctgcacagtgtcaatggtattttaaattatttattgaaacattgtctctctctgttgcccagctggagtgcagtggtgcaatcatagctcactgtaacctcgaactcccgggctcaagcaatcctcctgcctcagcctcctgagtaggactacaggcatgggccatcatgtgcagataattttttatttttagagatggggtctagctatgttgtgcaggctagtcttgaacacctgtcctcaagtaatcctcccaccttggcctcccaaagcactgggattacaagcatgagccacactgcacctggccaacaatgagaacttcaattgctattaaaggatatgtggaccaaagagaaaggcagtgcctccatgacagcatgcaggcctctctgttccatcttcaccgagggaagaaggggtagactttccagatgggcagaggtgaaaggcaagggacactgctgctggctcaggaccaatggttgcggcttagtagttctccaaggtcgtagggcaggctctgaggaggggtgcctctgggaagatgagtcctggggaggactgctactccaatggccattgttgtatctatgacccagtagctggctaagaatctgattttcctggatgtgggaaggtgcagtcaagggaaagtttgctgggggatcctgacagggtttgggggtcattcttggagggatagggtacctaggagaatctagacgcttggccagtgataaatttcctactgggaccccagcttgtagctggaccctcctgggcaaggcagccaaagcaagtggatctttacaggcccctcccacaggaggtgagggctcgcttctaccctctgccacctgcccctggaagcttctgcccagctgagtcaggtggcctggtggatccaatagtaccttttgtaataccgagtccacagcctgggacactgccctggtcagctctttcctcagaatctctagtgaagctggtgctccagaaggaaggaaactgggcttctcagactcttggtgtttttctgccccagagaggtccttgctggtaccttgctggtggtcaccgtccacaacccaggggcgaggcccacagccattcccctgctttgcactcagagggcctttccccgtgccacagcctcctggcccctgagctgtgtccctgggcttggcagcctgtaggatgtgctcttgcagatgtcttagctgttgcttcagcagatgaagttgttctctcacacgagggccccccttcctgttgccctggtcccaggcaggggctggcatcaggaggccttgcggtgtgggaaggttctgcttcctcttcctctctcgggccttctttgggcagcgtgggctgaccccagcttgcgcattgcctggcaccagaggattcggggagagacacatgcctcggacaatggtctccactctggccctctttgcctggatgtgctcatcaccaaaccattcggggtctgtagggctggagctggggacctgactccagggaaacggggagtctctatccagctctggaggggatgagcttctctcgccttccgtacaagcttctgctaggtgggagcagatctggggctgaggagaaagcaagatggagtttggatccatcccaggcacttgttcagggcttcaggaattcctcctccttatttcctcagctggaagtgcacccagaatgcgctgggcttcctcctctgcacttagaagggtaaagagccactgtcactgaggaaggattcagattctgggatgccagggctcatgaacctcctgggcagactcctgaaattagagacaggaagaaaagagtacgtgtgactttgaacagtccttttaaaatgtgaatgtgcaaacattcaacgcggtctcgttaaagtgtagatttcaattcagtagatgtggggtggggcagagattctccattttaagccagctcccaggtaatgctgatgctgctggtctcagaaccccactttgaggagactccgagagtgatcttacagggagaaaaatcttctcctgcttgggcataacaataaaataataataataataataatatcgtagtggcagccgcctgaacaactggcattatgccaagaactctacatccattaatttaattaatgtgtcataacagctccatgagaatgtggtcatgcctattgtctacagataagaaaacaagatcagagaagaagctacttccctatggtcatgcagctcgtaagtgacagactggggtcaaaccaagcgttgtctgattcggagtgacttttctagtgactaagggcaacagaatcacccaaggcacttctagaaatagcaaattcggcagggtgcggtggctcacgcctgtaatcccagcactttgggaggccgaggcaggcggatcacctgaggttgggagttggagaccagcctaaccaacatggagaaaccctgtctctaccaaaagtacaaaattagctgggcgtgatggcgggcgcctgttaatcccagctacttgggaggctgaggcaggaaaatcacttgatcctgcgaggtggaggttgccatgagccaagattgccccgttgcactccagcctgggtgacagagcgagactccatctcaaaaaaaaaaagcaaattcaggccgggcaaggtagctcacacctgtaatcccagcactttgggaggccagggcgagtggatcacctgaggtcaagagtttgagaccagcctggccaacatggtgaaaccccatctctactaaaaataaaaaaaattagctgagtgtggtagcatgcgcctgtaatcccagctacttgggaggctggggcaggagaatcacttgaacccaggaggcggaggttgcagtgagccgagattgttccattgcactccagcctgggcgacagagtgaaactctgtcttaagaaaaaaaagaaaaagaaaaaaaaaaaaacactgccgtcctaactcttggaaaaatcagattacgcattcactgttcaactatttattgaacaactatttattgagcacctgctgtgtgtcgggccttcttctgggctcatggagtgagcaagatcagcatagtctgccctcctggaacaggcagtctagcagggaaagcagagaataaacaaacaaatatattttcagtgtgtgatacctgctgtgaagagaaagcacaacaaagggttggaaactggagagagcggttggggagaaggagggagctatttcaggaaagactgcctaaagctgttttattcccacaaagcatcaaagtacactatactccaaccacgtcacttgctttctaactaataataatcattgaactgggccgggcgcggtggctcacgcctgtaatcccagcactttgggaggctgaggcgggtggatcacaggtcaccatcctggctaacattcatgaaaccccgtctctactaaaaatacaaaaaattagccaggcgtggtggcgggcgcctatagtcccagctactcgggaggctgaggcaggagaatggcatgaatctggggggcagaggttgcagtgagccgagatcacaccactgccctccagcctgggcaacagagcgagactctgtctaaaaaaaatcataatcatagtaattaaactggcagaactgatattttaaccaacagggacactacaacgataccctggatatgttaaatttgatataagtactagacagacatctaaatgtcaagatgtcaagaaagcaattggagactgggtgcagtggctcatgcctgtaatcccagcactttgggaggcagaggcgggtggatcacgaggtcaggagttcaagaccagactggccaacatagtgaaaccttgtctctactttaaaaaatacaaaaattagccgagtgtggtggcgggcacctgtagtcccagctacttgggaggctgaggcaggagaattgtttgaatccaggaggtggaggttgcagtgagccaagatcacaccactgcactccagcctgggtgacacagcaagactccgtctcgaaaaacaaaaaacaaaaaaccagaaagcaattgtagaaataagcctggggttcagtcagggagatctgggctagaaatgtaaaattgagggtggtcagcatgtggctggatgaggtcacgaagggagtaaatgtagacagagaagggaggagggccaaggtccaagtcctgggacacagggacatgaagaggctgggggcatgagctggcatcaaccaaggcaactgagaaggagcagtcagagaggcagggggaaacctaggggtgtgcgaggtcctggcaaccaagtgaagtaaatgtttctaggaggagggagaggccaagtcacaaagggatagtaaattggccatttgaattagtaatgtggagtcactgggaatcttgatcaacagttttggtggagtacagggagaaaaaagcctgattgacgtggatttaagggagaggacaagaagaggagtaggtgacattgaatctgacaactctttcaaggagttttgtaaagaggacagaaatgagacagtgctgaaagagaaaatggggtcaagagagagtttttcaagataggcagaataacagcatatttgtaggctgataacaatgttgctgcagaaagatgaaatatgttaatgtaggcaagagggggagaatttctggagccatgtgcttgagtaggaaggaggggaagagatctagtgcacacaaggagggattgactttagacaggggaatgctcagttcatccatgcagcaaaaggaagagcagtggaggcacaccagtacaggcaggtggataaatgtgatgggaactggtggaaattttcttttgattgtttccattttccccatgacattgccactggtattaatcttctaaaatgtagctagctctgcttatgcccctctatggaatcaaagtctttgctagcttcctgtggactagaaggttcagatgtctcagctcttcacaaacatggtctcgatctaactcctttggagccactaccctcaacaattgcctgtgtccagctgtcctggactttgtgttcactgaacaggccaggctccttccagcctccgtgtctttgcatttacattctcttggcccgaccagcccttctcccacttttccacggacaaactcttattcctctttcaaaatccaactgaaatgtcacttcctctctgaagtgatcaatgcatcttcccctttggtctgtgagctccctctttgtgttcccaagtagtgcctgactgccagatgttaccagatgtttgctaactccattgaataaattgtccataaatacttcatttatattgatttttgtctcctcaatagacaatactttatttcagatctctctagcacctagcatggaggcttgtgcatggaacaaaatcaatgcagacagaaagacagacgggtagatagagtcattgaggagaagagcatagaaccactaaagctgctgaatctcccttgtgggttattcaaggtattgtttctgaggttccgtgtagtctgtgtgctccagaagacagatctactagggtaacagatgggaccagtgtgtttaatgaagcaacaatgaacagaaatatcttgaggccagaaactggaaatccagccagactccactgtggctgggtacccagagatgtttacgcccatgcaatcatggaaactctgcctctgggctgctgagaaacaggaaacctctgtgctgaggccggcgtgctgcccacagccctttatctgggtaagtctgcatgaagcagtgatgctttctgtttgaaaattagctactagcactctcatattcactgatggaggtagcaattgtcataatcctttaaaaatagctttattgcatctcttagacgatgaaagtaatgtaggatcattttacttcccaaatatagaaatgtattaagaggaaaagaaagacactctaatgccactcccagagaaaatcagttaaaattttggtgttcatcatttttgccaagctcttttctccatgtacagagaagtttataatttctcgtaattatatatatatatatatatatatatatatatatatatatatatatataaacaaaaatggtattatagatatatagttttatgcctccatttttaaatctttcatgtggatgaatatcaatctacagcaacgttgtgaaagctgataatattccattgtatagatgtaccctaatttacttaacaagttctcctttgatagattccttcttatattttcactattatagaagcatagacaggccgggcgcggtggctcacacctgtaatcccagcactttgggaggctgaggcaggcggatcacgaggtcaggagatcgagaccatcctggctaacacagtgaaaccccgtctctactaaaaaaaatacaaaaaattagctgggcatggtggcgggcgcctgtagtcccagctactcgggaggctgaggcagaagaatggcgtgaacccaggggggcggagcctgcagtgagccgagatcacgccactgcactccaacctgggcgacagcgagactccgtctcaaaaaaaaaaaaaataagatagtatggagatagatggagaacatagacccacaaatcagactgcctagacttgaatccctagagccacttagctaagtttgtgacctctccgtacctcagttttctcatcagtaaaatgggcataaccataatatctatggttattgtggaattcacatctggatccaataagttaacacatgttatatttttagaacagttcctggcacttacttattgctgataagttgtagctattgttattatgaataatattgggattaacactcctacatatttctttggggactacatttctagaagtgaaaatattgcatcaaaggctgagactacgttaaactgttctacttcttttccaactgtcctccagaaatgtaccaactgactgggggtagagaggagggactgaagcagaaccttcaactttttttttttttttgagatggagtttagctcttgttgcccaggctgaagtgcagtggcgtgatctcggctcactgcaacctctgcctcccacgttcaagcgattctcctgccttagcctcccaagtagctggtattacaagcatgcaccaccacacccggctaattttgtatttttagtagagacagggtttctgcatggtggtcaggctggtctctaactcccgacctcaggtgatccacccaccttggcctcccaaagtgctgggattacaagcatgagccaccatgcctgatctcaacttttactctgtgtatttctatattaattgaatttttacaagaatatattcgtgtgttacttgtatatatatacttttaaatagccaatttatgctcctaccaatgtatctataaaagaacatacatctccttatctttatcaacgctgggcattgtcttttaaatctttgccgttatggtaggtgacaatgttacctcattatgtgtatttctttgattctcagtaatcttgctcagttttcatatattttttggaaatattcatggattgtatattaagaaacttaaaaatgtttataccatttgaatcagtgagtctatgtctatgaagttaagccaagaaaatgatggctagactcataaatttatgtcaaagatggccatccaagtattattaataagagtaggcactagttaaggtatggtataatctacatgatgccatattatgcaaccgttttgaaaaatagtgtttaagtaaagtttatgtaacattattttataaaactggagtgggggggtaagagaaaattagatattaaaaatacaaagaaaaatatgaggccaggtatggtggctcatgcctgtaatcctagcactttgggaggctaaggtgggaggattgcttgagctcaggagtttgagagtagcccaggcaacatggcgaaaccctgtttctccaaaaaaaaaatcacctgggcattgtggtggcttgtgccagtagtctcagctactagggaggctgaggcaggaggatcactgagaccaagaagttgaggctgcagtgagctctgattgcgccactgcactctagcctgggcaacagagggaaagcctgcctcaaaaaaaaaaaaaaaatacacacacacacacacacacacacacacgcccatacattatagagaaataaatacatcaaaatgttgtttatgggtaatagaaccacaggtaatttttttctctattttttctttttatttttctgaattttctaaatttttaatggatatgttttcagttttgtaatgaaaaaaggcaatcttgcctttgttaattaaacatttgcatgtatggagaaagctatgcatgttgaaggcaggggatatatgcgaaatctctgtactttccattcaattttgctgtgaacctaaaaccactctaaaaaataaagtctaggccgggcgcaggggctcacgcctgtaatcccagcactttgggaggccaaggggagtggattgcctgaggtcaggagttcgagaccagtctggccaacatggtgaaaccctgtctctactaaaaatacaaaaaaattagctgggcgtggtggcatgcatctgtaatcccagctacttgggaggctgaggcaggggaattgcttgaaccacgggggtggaggttgcagtgagccgagatcaagccactgcagtccagcctgggcaacagagcgagactccatctcaaaaaaataaataaatagatagataaataaataaagtctagacagatgtggtggtgcttacctgtagtctcagctactcaggaagctgaggtgggaagactgcttgagcccaggagttcaaagctgtagtgtgctacgatcatgccaatgaatagccactgcattccagcctgggcaacaaagtaagaccctgtctctaaaaacataaagtaaaataaataaagtctattttttttaaaaaaactgcacttttttctcattaactctttcccagatacatattcctcggtaccagaaataaaaaaccccactggagaagcaaatttagctacaaacacaagcatagaacacagggcttataagataactgcgaaggcacataggattttatagctggaaaatgtaaaatgagggtgagtttgaatttcaagtatataatggacgacataaggctagatgtggtagctcacgcctgtaatcccagtgctttgggaggccaaggctcaaggatcacctgagcccaggagttcgagaccagcctgggcaacatatcagatccaatctctgcaaaaaatagaaaaaattaaccagatgtggtggcacctgtctgtggttccagctacttgggaggctgaggtgggaggacctcgaacccaggaggtcgaggctatagtgagccatgatagcaccgctgcactcagcctgggcaacagagcaagaccctgtctcaaacaaacaaacaaacaaacaagaacatacgagagaagttgtgtgttgtctcctttcagctttgtgttagagcaccggggcatgagctgaaaaggaacagccagtgtctgtggcatcatcacctgcacagatcacctcctacatggcagcctttctccctgtgggtctatgtccttccatggaatatccctggagagctcccgaagctctgcccaagtgggacaaaggggaagggctgcctatgaggccagctgaggtgagactggcagctcacaggccatgtctccccttctgtgatgtgtacacatttagggaacagcaaacacctttgatgcgcttcagctgggtcacaagagaaccaatcaataaagcaaggtgggctatggagagtccttaggtaaaaggtacctcgtgaagcccaagagatgctaactcattctcatcactgtcattgaagctcaaatcagatttatacaagcagttttattgttatttccttgataaaattcctgcctggtttttgttgggaaaacatgtttttctttgcagtattttgttcattcatttcctagattcagttggattccaactggaccagccttgtgcttagtagatgaccacccaacgtgattggaaaggtatggaggaaaatgccttatcctgaaacagctgcttttaccttcatcaacactcattatgggatctaagggcccaccactggcatttcataataatgatgacttaatcacatctgtatatgaatacatttttgccttacccattgtactcctgaacagccgcccatccaaatacttgccagacagagctaacttttgctactgatgaagacttgttcagggtagcacatctcaaagtcacatagcgtttttatgcttttcaaaggcattttcatatacagccttgtcctgttttattctctatgatgagaggccccctgcactgtccccactctgctacaggtcggaggccacccatccatctctggtccagccctgaacaggctctcttcactgcactggctaatgacagaaatgaggagagggggtcagactgacaggcccaggccacacagccctgtccatccacagacacagacacaatggagtcagaagccctggtggtctgcatcaaccactgcatggctgtgaactatggaatgatctaccaggtattagacctggggggaatcgttagctattttttttttcttttgagatggagtctcgctgtgtcacccaggctggagtgcagtggcgatcttggctcactgcaacctccacctccttggttcaagtgattctcctgcctcagcctcccgagtagctgggactacaggcacgtgccaccatgcccagctaattttttgtatttttagtagaggcggggtttcaccatgttagccaggatggtctcaatctcctgatctcatgatctgcccgccttggcctcccaaaatgctggaattacagtcagtcgtgagccaccgcgcccagccctttgttagctcttatgtgaacttacacaaattaactctgccttttccccttcagtttctctggctgtaaaatggggttgataacagtcactctcttaggattgtggtgaggatcacatgtggtgggccttgcattctctggtgcgggaaataggcactccttaaactggtttcctttcctcctagggggggttcaggagcccccacagccatagaactccagagctggaaagggcttaggagcatctggtacagtggctggtctccagatttttatatttttagatgtcaaccattaataaaatgaagaggtcttctggccccggccaaggtgccagtcgcctcctgagatcctgtgccttcaaaccctgagagtccatatttttaaaaaaacaaaatgaaggaattaaggcttaaggaactagagagtcacctgcaataagtggatggattcgaaaaggccaagctacttctagaacagtatcccaccaagcttcacattgcagcatgtatgctgtatgcaatccatagcacttatgatgacattgaaagtgaagtttttgcagatctaggctgtagtggtggaatgcttagcatgggaactgcagtgtgaggagcagggttctgtgttggatttgacagagatgaagatgtattggaaatagttaataggaatgtggaagagtttgagttaacaaatattgacatggttcaatgtgatgtgtgcctgttatctaacaggatgtcaagtcatttgatacagtaattatgaatccgccttttgggaccaaaaataataaagggatagatatggcttttctaaagaccgctttggaaatggcaagaacagcagtatattctttacacaaatcctcagagaacatgttgaaaagaaagctgcagaatgggaaatcaagatagatatgatttcagagctttgggatgacctgccagcatcatacaagttttttttttttttttttttgatatggagtcttgctctattgccaggctggagtgcagtggcgtgatcttggctcactgcaacctctgcctcccgggttcaagcgattcttctcactcagcctcccaagtagctgggattacaggcgcccaccaccgagtccagctagtttttgtatttgtagtggagacagggtttcaccatcttggccaggctggtcttgaactcctgacctcgtaatccacccacctcggcctcccaaagtgctgggattacaggcgtgagccaccgcgcccggcctatacaaatttcctaaaaataaatcagtgggcattggagtggacctaactcagttttcattttaaaagcccccaaaacaaaagtagtttaaaacttatttaaaatgaataaaaattggtttactaaaaataaaaaatgaaacgaagaggaaagatattggaccagtttgagagttactgacattttattttgcaggtgaaggcacaaaaaataagtatacaaaagactactatctaccatcacttttatttcctctttaaaattttttcatctcccttcatgacacatgatttttatttcttaaagaatcttagctgggcggggtggctcacgcctgtcatcccagcgctttgggaggctgagatgggtagatcgcctgaggtcaggagtttgagaccatcctggccaacatggtgaaaacctgtctctactaaaaatacaaaaattagctgggcgtggtggtgcatgcctgtaatcccagctactcaggaggctgaggcagggagaattgcttgaacccgggaggtggaggttgcagtgagctgagacgtgccattgcactccagcctgggcaacagagcaagactccatctcaaaaaaaaataaaaaataaataaaataaaatcttaaccactttgtttttaaaagaataaaagggggaaatgcataatatgcaaataagtttagctttgcgaaaaactctttacattgtcttttctcatttttctaaaaaccaagggaaatgtcacaggctagcgttaggggtccgaggatcttcatgacatgcctttactttatggatgaggaaccaggagcccagagaggtaaggtgacatgcccaaggtcacacagcagctgcaatgcctccttgctctctaggaaaacacccctggacatcagagatcctttcatgtggctgtacaagcacttgggctgggagttaggaggtctgggcactactcccagtcattggccctaaagccgcatattctgcgtttcagcttttataaaatggagatgataatcatcccttcactgagaacttgggtgagaatctaatgaaagaagagcttcaaaagggctccagagatgcatacacagtattatggagtgaggaattagggagtgaaatgtctccatgtctataatttgcctgaaagtatttcagccaacaaaaataagcaaatacatatgaacaattgttaaatctaggtgatgagtataggggtgggtattgctatgctactctgtctacttctctgcatatttgacaattttcataatgttccataattttttaaaaagtactctggcaaggtaaatggaaaggatgatgttactcacagggaagaggtcctctgggaggtccttgtcttgggctctgtggccaggtggggccaaccactctagaagacggagcagcccactcttcaccagccctgggcagacagagccatggtcaggaagtgcttctggtttccctgcttcctctccaggcaggccgggtgcccgtggctgggtgaggggaggctctggccccttcttagcacaaggcactgtctgacagacccagtcttgctgcagccgctgactctggggacagtgggggctgcttagcgcagccaaccggcatggggggcttatgaatatgcaaattgaggccagctggttggctgcccccatgccatttctcaacgccaccccaactcaggtgcccagaaaagccagctcagagagggccttcctgaaatgccatctcttctgtctttgcctatggaccacagagccctttgaaaacttggggactgaatcacccagcttctctcattgctctggcctccagcgggaagctcctgacttctgctttcaaattccccagagaggcagctccaatatgaacatcctctccctgtccctcaagcatcctgagaagactggaatcagcccaacagcaaaccatggcatctcagatctgcaggaaggagaggctgcgtggtccctccctcccacagaggcctgaacactgctgaggaagctgctgctgggccaaaagcacccatccctgacagatctgggagaactcactggccaaacccacctactcccgaatgtaacccaaattttgccttcccctcctccttcagcttgagaagtggaggggatgttgtgaaatacagcaatgaaaattagtaaaccacagctcaactcatcaacgtggacaaatcctcaaaatacaatgttgactgaaagaagtaagtcacagaggctgggctcagtggctcacgcctgtcattccagcaccttgggaggctgaggcgggcagatcacttgagcccaggagttcaagaccaacctgggcaacatagagagatcgcatctgtaccaaaaataccaaaaaaaaaaaaaaaaagaaagaaaaaaaaatgtgcttttggtcctagctacttgggaggctgaggtgggaggatgaggattgcttgagtccaggaggcagaggttgcagtgagccgagattgcaccactgtactccagcctgggcgatagagtgagaccccattacaaaaaaaaaaaaaaaagggtgggcgcagtggctcacgcctgtaatcccagcactttgggaggccgaggtgggtggatcacaaggtcaggagattgagacctcctggctaacacggtgaaaccccgtctctactaaaaaacacaaaaaattagccgggcatggtggcaggtgcctgtagtcccagctacttgggaggctgaggcaggacactggcatgaacctgggaggcagagcttgcagtgagccgagatcacaccactgcactccagcctgggcaacagagcaagactccgtctcaaaaaaaaaaaaaaaaaaagaagtaagttacagaatgatacaggcactgtgattccatttctactaagttaaaaaatagaccaaaaaaaaatacccacacaaaaacatgtctagattttcattgtgtattcatcagtccattattttgaattacaactgaatgaagagatagacagatagatggaatctaggtatcataggtaacactgagtgaatatagggcatagtccctattttaaggagcccaaagatggaagcataggctatagccccatctactagctggccgataatattcataaactcataggcaaggatgtgaatgtatggttcagaacacacataagaaaaccgggggatttgaggtaaatgagctacttaatcctttctaaaaacacaccttttttcttatttaatttgaaagtaaatacatctttcattttcattttttatttttttctatatcagaccactgctggagacatctttttcttaatttaaaaacacaggcaaaaatgtgtatagaacataagcatattgaagctataatgaaaacaaggggatggttaatatataattcagtatagtagtggctaactgggtgtgatgatggaggagaccacagggaacttttccattccttcagctgggcagcaagtatgggaattccttttattatttttcttttaaactggacacatagatttttatatcctttttaatacgtattttacaatgaaaatgtttttaaaaattatcttttgggccgggtacagtggatcacgcctgtaagcccaacactttgggaggccaaggtggaggggtcactacgtcaagagatcgagaccatcctggccgacatggtgaaaccctgtctctattaaaaatacagaaattagccgggcatggtggtgggcgcctgtagtcccagctactcatgaggctgaggcaggagaatcgcttgaacccaggaggcagaggttgcagtgagccaagatcatgccactgcactccagcctggcaacagagtgagattccactcaaaaaaaaaaaaaaaattctcttttgagccctgccacaatttatattcataaactcttgccccagtagatggtgctgtgtcttgggaagctctaaatgaaggagtgccctagcttattgggttgcagcttggagtccatggaagctcgtatgtgaatctcgaggaaatcaatttcaacttttaccctctcaatgggattttgtatgaaaccatgctcgagtgtgtgtgtgtgtgtgtgtgtgtgtgtgtgtgtggtgtctttagactgtaatatctaagattaacttgggtgatcactaaaactccagaagtgctttgccacattataaccaggcttgaagtcttgaagcctctacatctttttttttttgagacggagtctagctctgtcacccaggctggagtgcagtgacatgatctcagctcactgcaagctctacctcccgggttcacgccattctcctgcctcagcctccctagtagctgggactacaggcacccgccaccaggcccggctaattttttgtatttttagtagagacggggtttcaccgtgttaaccaggatggtcttgatctcttgacctcgtgatccgcctgcctcagcctcctaaaatgctgggattacaggcgtgagccaccgtgcccagcctgaagcctctacaccttctataagaatctcaaaaattgttaaagactgtgaaagcctgtaatcccagcactttgggaggccaaggcaggcggatcatgaggtcaagattttgagaccatcctggccaacaccctgtctctactaaaaatacagtgacaccctgtctgacaccccgtctctactaaaaatacagaaattagctgggcatggtggcacgcacctgcagtcccagctactcgggaggctggggcaggagaatcacttgaacccgagtggcagaggttgcagtgagccaagatgagatcatgccactgcactccagcctgggcagctgagcaagactctatctcaaaaaaaaaaaaaaaaaaaaaaaaaaaaaaagaccgtgaaaggactgggtagctatctaagaaaaatattaacagcaacactggcaagaaattgccatagcccctgactaccgttcttggattcttcagctgtgtccaccaatgttgtaaacatggaagtatttagtcattccacaaatatttattgagtacctacagagtcccaggaactctgatgtcccaggtgttgtgtttggaaaattcaggaaaatagagagtggtctctttccacctgctgctctatgcagcatgggagacagacaggtaaacaggacattacaataaaatgcaatgtagaaacccagacacagtgctttggaagcatagaaaatgtatctgttaactctgccagaggggttaggaagggattaagaaggagatttaaaggatgactaggagttcctaggcaaataggaggaggaaacagcccatgcaaatagctcagcaaggctatggccagtagtgtggtttgactaaagctcacaatctgtgagaatgtggggagagaatcagaacataatcagaggcctgattatcaggtgcctggccaagttgaggagtttgtactttatcctacaagggagataaactttatctcccttgctttatccgaccaggagaagcaatgaaagactttaatcagaggagtgacaggattaggtttgcatttcagaaggatttcttttttttctttactttctttttttttttttttttgagacgaagtctcactctgttgctcaggctggagtgcagtggtgcaatcttggctcactgcaacctccatctcctgggttcaagcaattctcttgcctcagcctcccgagtagctgggattacaggcattcactaccacacccagctaatttctgtatttttagtagagatggggtttcaccatgttggccaggctggtcttgaactcctgatctcaagtgatccacccacctcatcctcccaaagtgatgggattacaggcgtgagctaccacaccaggctcagaaggatctttgacacagatataaaggatgatgggctagagaaagcgagagcggaggcttagaactgcttagggagcttttcaaataattcaggtgaaagctactgaggagttaattgtgggtagcagcagggcagagctgttttctctatttctagttaggactttggcccatccttccagaatttcagtggcagtgctttcagggttcaggtgagtgaaggcactgtaaaggtcctgatggaatttgaggccagcctgggcaacatagtgagaccccgtctcaatttatattaaaacataaattaattagaaaaataaaaaataaaggtcctgagggccaggcaaaatgcctcagataaagaaatcatcatgaacggcaccaagtggttcattcattcattcatacatttatgtgttactaattcagccagaggtttaaagcacatctttttcattaggaaggtgagccttaaaggtgaatactcaaggggcctgaatacttaaggaggggaaggggatgctatatgctttcacttcaagtcagcgggaagaatggcacactcaaagtggggaggtcagcctggcatggtggcacctgtagtcccagctactccagaggctgaggcagagggatcgcttgagcccagagtgtcgaggctccagtgaactatgaccttgtttcttaaaaaaacagctgggagtttatattctagggatagggtgacaaacgaacaacttccaaaatgcacaagatgtatggggaacaattagtttggctggaatttgcgttggggggagatcagaagctgttgagaaataaggctatagttggtgaagatatccgactcgtaaaaaggcaatgggatttagaaattcctgggattctgtttctttgactcggggttaggaagacagggaagtaacaagtgcctttttttttttttttaatagttaagggacctgagactgggggtggggggcaatgtcatctgccccaggccacacaagtgtaagatcaggcatgcatgtctgccaaggtttcagttcaatgtccgtgcccctcttttgctctcttcccaaggtacagaggcggaacggcgcggtgccctcgggtcccaagagagaagggcgccaagctcagagccagttctgtggaagggtaggggaaggcctgaccccgggggcaatgtggtggcgggacagtcgtatacaccttcaggagaaccacctcaggctgacaggcagtgcggagggccccaagagcgccttagggttgcctgctccagagagcgggactcctgcgctgcagccgggatactgggcgccgccgtgcgcccaccccctgccagtggttcgctccgaacacccctcgtcgggcggcgggtactgcggcccgccccacttccggttgttgtccggccctatatccggtgtccgcccgccctcggctcctccgccgtgatgctgtcccgatcccgctgtgtgtctcgggcgttcagccgctcgctctccgccttccagaaggtacggtctggccgagccggggccccgacgggtgaggagtctgttggcgggcagagaggcggcctggaaggcaggggcgcggcgcgccggccgggccgggcaccaagggcactgggacgcggaggccgcgcgggctgggcggcccggggccgtggttgccctcgggaccgttttgcggagcccagcggccccctgccttctccaggcagcctgcggggaacgtttcctgctgtaccccaccctccgcgcgggagctggggagccgcgcccgtccagatacttgactcagagttagggaggaggcgcggcggagtcctccggcgggattcggcgcccgtctcgtcttgctctgttaaaatcagtgggtattaatgagtcccgttgggaagttgagatagtttggcaggcccagcgtgttgattgggtctgccagcacggtgtgttgcatttaccttcggagttacgagattcacctgtcaccaccactgggacagctttgagcgtgtacttaaaagaaaaagctgggtttttttttcatcttgggtgacgtcgataatgtcttctttctcaacaggggaactgccctctagggagacgttccctgcctggtaagttctgcccttaccgtcacctaaaatgctctcctcctgggcagagcagtatgtgaggaactcgggggtgcctgtgtttctcataatatttaaagacagtttggttcagagagtagtgagacgcaatgctacataatcacgagctatcgcttattcatttagctcgtagttgagtttctactgtgttaggcactgtgctagacgctagggatacaggagtggatacagaagtgtacagttcttgccctcgtggagctcctaggctagttggatagtgtcagttgctaaacaagccaacaaaggcaaatttttgtaactgctgagaaggaaacgagggtggacagaagagccctttttgaggaggtgacttaaaagttatggccatggccgggcgcggtggctgacgcctgtaatcccagcactctgggaggctgaggcgggcggatcacgaggtcaggagatcgagaccatcctggttaacacggtgaaaccccatctctactaaaaaatacaaaaaattagccgggcgtggtggcaggcgcctgtagtcccagctcctcgggaggctgaggcacgagaatggcgtgaagccgggaggcggagcttgcagtgagccgagttcgcgccactgcactccagcctgggcgacagagcgagactccatctcaaaaaaaaaaaaaaaaaaaagttatggctagcagaatgtgacggagctaacccagtgaagcccaggagaaagagaatggcattcacaaagaccctgaggaagaaaagaggttggcagaacttaagagctggaaaaaaggtgatttggccggagtattttggttaagggagagagtggcaagagatagaagatggtatagagactgaaggagtttagattttatcctagcagttaaaaagaaaaaagtgtcatccatagctttttttctgttatatgcctagcctaagtatttgttgaatgagttgaccttgttgtgggctttctttgtgccaagcatttatatgagtgctttctgtgaattttttagttaatcatctcaaaacagtaaaaagtattttctctattttacaaatgcataacccaagacaagagagcttaaaagccttggccatggtcacccacccagctgttgataagccaggtctacctgacccatcctgaactcttaacccaccatgttctcatttactcatggactcaacagatcatttattgagtgcttactatatgccagccactgttctaggtaacaggggtatagatagactctagcctcgagattttatgggctagctggagagagagagcaaatatacatttatgctccgacaagggcataaattttggttactacgagagaggaattaaagggtgtgatgagagggtgggatgatgtagaccagcttgggaaggttgggaatgtcagtaaaggcttccctgaagaagtgacatttaactgagacctgaatataaaagagccaagaaaatgtattccaggcaaagggaattgcttgtgcaaaggttttcagacaggaaaggacttgaccagtgatagacatgggaagaagcctgtctggcaggaaagatagagtgggctggacggtacaggatcgcgtaaagtgtggactttatcctgagagttatgagaacataaagcccctagcacaatgtcggcttgtagtggactctcaataacaaacatgtttttcaagtgggaaccctgaacaatgtcagtaaacattttctccacttcataggtgggcaggacaatggaaagagccttgcacttggggatttgcatttgggctcagggattcaccttgggctagtcgcttaacctccaaaagtcctacttatatgaaatgggaataatggcagatggtcgttccacttcagagagttgtgagactgtaaaatcaaaatgaggtcattatgggaaagctttttataaaccctaaagcactgtacaaatgaaatttgctgtaggatgaactctgaattggactccaggttcccaaaatcagtgtgagccgccatctattctagttcaaaaacatactatgcttagaatttgcactgcatagtcattggctgctggacataaaggtgactggcttacctatcttgggatgcttgtgaggaggtgggcataagagagggctagctctcatttggtgtgtcctgagcccatggttcagaaagagttgttaatctgaaagaaaaaagacataagaaagaattcagaagaggcagctgtagttactagtcatcagttggggaaatgcagttaactatgataaggacagctggtgggcagaaagggtctctcaccttgttgagagtgaccagggtggaagacttcagaaaggcatgggaagtcaataaactgaaagatggggacatgattttctcagctctaggacaaactggagaccccgagcctaaagtagccaagtctttgctactaggattcaggtgataagatttccaacccaatcttttcaaacccagaccaaacatcctccttgcttctcaaattgggttatgtatagtcacaggataagccatcccatgtctttctcaagcttcagttgtatttgaagacttggcgagtagagacattttattatgaaaacatacaggaataatgaaaagttctggctttttaaggtagatgagattatataatcactttgggctgtgccatcaaattttttctctttcctccccagccaaacacatacccactcgatctcacatacccatttgctctctgccactaaggctactttggaaaagtttgagaagcaggactctatgataaagattatatccgttgccgttgatcctgctctgtctcagggttgggggtgagcagaccttttccattcccagcatgtatcctttgtgagataagagttgttggttaagagttattttgtttcttgcaggggtctccttatgccagggaccaggttaccctaacagcaggaaggttgtgtaagtatcactggggagtacagatatgtggccacgggttatttatttaaagacataaagttctaaatttgaccatctgatttcttcactggcctccagacctagaaattgaggtgattatgttgagtccctagactaacctcaatgttcacttttcccatgtgatgttccttgagcatcagctccgtgtcaggttttggactgggagtgtgcccactctccacaggtgtttggattataatgaaagttaagttggaatcctctttttatgggatatagaagggtgctcctagatattctgtttggatgtaagtgcagctgaaaggctcgaggttacatttattgtggagattgagagcatcctctcagtagcatagttactcatttttaaaaacagtaaaagcataaaactggttgagtcctgggactgactgactagtttggagggaatgctgttattgcataatgcagagtttggagaaaggctacccatgtgtgtttcagattaacttctgcgtatgaatgttgcttaaatgctgctttgcattccaagtgtttttgtggtggtgctaagagaatgctctctagtaacctgttcagcagctgtcaggctgcttactctacagggagaatcctcaaagtgaagaggtcagcggatgagcttcttacttactctacatcacaatgagggtttttgttgttgttgttttgagacaggatcttgctctgccactttggctggagtgcggtagcctgatcttggctcactgcatcctcagcctcctgggctcaagagatcctttcacctcagcctcctgagtagctgagactacaggcacatgccaccatgcccggttgttttttgtattttttgtagagatggggttgttttgccatgatacctgggctggtgtcaaactcctgggctcaagcaatccatccacttgccttagcctcccaaagtggaggatacaggcgtgagctatggtgcctggctgattttttaaaatttgagtaaatgttgcactcagtactagaaatatgaatcccggtgttattttggagggcagtttgatagtcataagtctttgaagtgtgtgtaccttttctttttttctttttttcaagatggagtcttgctctgtcacccaggctggagtgcagtggcgcgatctcggctcactgcagcctctgcctctcgggttccagcaattctcctgcctcagcctcctgggtagctgggattacaggcgcacgctaccacacctggctgatttttgtattagtagagacggggtttcatcttgttggccaggctggtctctgaaactcctgacatcaggtgatccgcccgactcagcctcccaaagtgctgggattacaagcatgagccactgcccggcctgtgtgttccttttcatctagcaattccatctctaggaatctatactgaagaactcctggtatatttatctcagatttaatatctgataatataaatattatcagatttatcttaaaatggcaaagagcaagggattggctaaactatagcatgttcacatgttcacactatgaaaagtgggaaaaagcaggttacaaaataatttcattttctactgtgtggtatgatcccattgtaagtattctttttgctatttctaatattctgtagtgaacatctagttatttagagattcaaaatgtattactcatctgcaatcaaatgaaaattggggcaatcatgactctctacaataaatacactaaatatttgaaagtaaataatgaagaaaaagtaaactttgtgtgggatcaccccaatcatgtcaccctaatccagtatctttgtgtgtgttgtgccttttttgtgaataaggtacccactttatttaataaatcttttattgtaaaacaatttttggttttatgtttttactaatagtattatatttacatgattaaaaattcaaaaagtaaaaagggtgtccatgagaagacttttttatccttgtcctctagccccccgaatgcctcttgggtagtggtggccaccactccgggttcctggatgacttgcagagcagcctctgcacttgcatgttacctgttagttcttgcctataggcatgtactttacaaggttacaaactatatgtagaacaatttgtattcttgtagtttttaaatatcttcattttttcttggttatacatagaccttatagttattttgacattataaaagtaaaaatacctaaagacaacttaaatctcttttacttttctattataaaaatgcttgttgtggaatattcagacaatcctgaagtgtaaaaagtgaaagtccccatccaaatcattctcccaaattgtgtaagtgtgcaacacataaccagagataccatatatgtctacatctctcacccctcagaggtaaccactgttaatggctttgtgcatacagggtgagctgattctccagtttatattatttactgtaaaggccatatcagtaaacgccttggtctttgaggttcgttttgaatgaatccagaatgtgttgatgtgctgttttctagcaagagaaccgagtaggagataccatatggggtttgtgtgtggtttttttgtttttgggttttttttttttttttttggcataacaccttgttttacttccgagttaaccttgttaatcttgctgccttatctgatctaaatctgttatcttgagggcagaaattccattataccttgcacaatggcttgtaccctgggcaggccgtaaatctatctcggatttagttaaggaagagacctggctggacatggtgactcactcctgtaatcccagcactttgggtaggatctttgagacccgtctgggcaatgaaatccatagtctacaaaaagtaatttaaaaaaattatctgggtggcatgtgcctgtagtcccagctacccgggaggcagaggtgggaggatcccttaaatccaggagtttgaggttacagtgaactattatcatgctactgcactctagcctgggtgacagagcaagactcttatctcttaaaaaacaaaaaaccaaatcaagaagctaagtcatttcggtctgcaaaggaccaaggtgcttatttttttattgaaagagccaaatgtaagtctgttttgtgagagttggcattgcattgcagcacaggggcctgagcatacttggggagctcaccatttaaggtacctgggtcgttaggctctactccagacctgctgagtcagaatccctgggggagaggcctagacaagtgaactttgaaaaagttcctccccaagtgacactgatggacacccctggtcaagagtcactgtttaaggggaaggtgacccatggggccttaactagactaaaatgtgagtggttcgcctgttaaaaggagttaacgtgtgtttcttttgtagcattaacaacagtgtcttcagtgttcgctttttcagaactacagctgtatgcagtaagtacctgctttcttgggaatggaattttatgggaagagcaacaattgattgagtttaattaaagaaaaatattaaaaaggaaaaatgaactacttatgattttcttttttgcatttttcctagaggatgacttggttacagtcaaaaccccagcgtttgcagaatctgtcacagagggagatgtcaggtgggagaaaggtaagatttagtttcctattttttttttttttttttttgagacagagtcttgctctgttcccagcctggagtgcagtggtatgatctcggctcactgcagcctctgcctcccaggttcaagtgattctcctgcctcagcctcccgaatagctgggattacaggtgcccaccaccatgcctggctaagttttttgtatttttagtagagacagggtttcaccatgttggtcaggctggtctcaaactcctgacctcaggtgatctgcccacctcagcctgccacaaagtgttgggattacaggcctgagccactgcgtgagccactgcgcctggctcctctcacttcttaagtttaagtgctatctaaaattctcccctcccctcaggatagttgtagaatttatagctctgccgttttctttacatatgtactttctgctggccctgtaggaaagggttcttataacatacctgccaaaatgggttttgtggctactggaggctccccgctaacaggtagccttgtagcctttgattgtcttttcagctgttggagacacagttgcagaagatgaagtggtttgtgagattgaaactgacaaggtaggcttatcttatattcgtaccagcttttcatgggcttcccttagttaacctaatgaaagaaacagggacttaaccattgtttagagataatttttaactagctctaacttcagttgtaaaattattggatttgttcaatttaaaaaaaaaacaactttttacatttaactttttttttttttttttttttttgagacagacttgctctgttgcccaggctggagtgcaatggcctgatctcagctcactgcaacctccacctcctgggttcaagcgattctcctgcctcagcctccctagtatctgggcttacaggcgcatgccacaacgccgggctaatttttgtattttttgtagagacaggtgttgccaggctggtctcaaactcttgacctcaggtgatctgcccgccttggcctcccaaagtgttgggattagaggcatgagccaccgcacctgacctgcatttaactttaaattgtttgctgtgtgtgtactatgtacttcatttagtagctttagtcttgtagtgtgtggtgagggggtggggagggtaaataagctgtttccactttttcctgtatcacttggaaacatattaactgaatattgcctgaatgtttctgagaaaggacagaaagtgaatcttcacagtagcgatgacttgttatcacccttgctctgaaattatggccttagatgtttgtgtgcaaggccttatatattgtgttgcaactcttgttactcactggagatacgctgttgttgttgttgttttgagacgtttcgctctatcacccaggctggagtgcagtggcacgatatcggctccacctgccaggttcaagcgattctcgtgcctcagcctcccaagtagctgggattacatttttgtagtttttagtagagatggggtttcaccatgttggccaggctggtcttgaactcctgacctcaagtgatccgcctgccttggcatcccaatatgctgggactacaggcatgagccactgtgcctggcttcattggagattctatacagctaattttctaatgctggataaacatttggacttcctccatctgtcttcctcttccagacatctgtgcaggttccatcaccagcaaatggcgtgattgaagctcttttggtacctgatgggggaaaagtcgaaggaggcactccacttttcacactcaggaaaactggtggtaaagaagttctcctggtggtcaaggtctccagtgttccctcttgggattgggactgagcataatgtgctaattccccgatatgtcaaagactcttgtcattccagctgcccttagttgagggaataaggggtaaatttatatatagtgtgaacttcaaatgtcaaattctaaaagaaaagtgtattttttaaaaaataaaccttatactctgttctttccatgggtgtttcttagcaggagctgagaaactggaccttttcttatagatatacagattgagcatacctaatctgaaaattcaaaatctgaaatgctccaaaactgaaaatccaaaatctgaaatgcttcaaaactttttgagcactgacagaatgctcaaaggaaatgctcattgtcttttatggggaattcagtgttgtttcttttcacatctgttctctcatatctctaggaagggttggtatttcttttgggaagaaatgagaaacgaatttgtactggacctgataggattagagattaataactttatctgactcttagttaaattttataaccactaaaaagtctatttctttttcctaagcgagaatcgtacccgtagaccaacgagtcacagaagtctatttctttttcactgttacactaataaggcagatagaccgcatgattgaggttagtcaggcaagaccagaagctcagagtagaaaacatgtatggtagaaggctgggaaataaggtagtcctcctgttgcagaagtttgtcttagcactaaccctggatataatgtccagatgggtgaaaaacagaaacaaacatttcatttaaagttgtgagattattacttggccacttcagtgatttatgagtcatcctggatgaagtgctttcttaagcctaagtcaaccctcgatgactattttattttttgagatggagtttcactctgtcgccaggctggagtgcagtggcctgatcttgattcactacaacctccgcctccggagttcaagtgattctcctgcctcagcctgccgagtagctgggactatgggcacatgccaccacgcccagctaatttttgtatttttggtagggacgggctttcaccatgttggccaggatggttttgatctgttgaccttgtgatccgcctgccttggcctcccaaggggagtaatcccttggcctgtaatcctgggattacaggcgtgagcaactgcacccagcctattttttaatagtattcttgcatatataatgttaaaatagaggatgaagagtatcagtaattagaaatatgtttatgtatgcatttcaatattttaaattgcctaggtgtttttttttttccttggaagtttacattttcttgggcttgataggtgctttgaaagtacttgctgaatttattcagtggaaacctgtgaaattgggaagggagctaagttgagccagttatctgatggacatttagggaccctgaggactagagaatagtgccttatgtcattgtgtgtgtgtctcatagtgctttgcatattgctgatacccagtagacattcgttacttgattggagctagagtttttgccactaaattttgcttggttgcttctcatttcagacagtgccagtggcatatacttttcttgtttttcagctgctcctgctaaggccaagccggctgaagctcctgctgctgcagccccaaaagcagaacctacagcagcggcagttcctccccctgcagcacccatacccactcagatgccaccggtgccctcgccctcacagcctccttctggcaaacctggtaggcttccaactcccacatgtcatgtgggagaacatctcgtctaatatgttccttcaaagggtaaactctagactgatgatggttctgaacaggccaggttggctgctttgtagaaagaattctagactttgtatccaaaggcctgctttgcatctcagctttctgttactagctgtgtgtctttaggctagtcacttaatttatctgaacagattgttcatctgtgaagttggagtgatactaatatacctcagaatatcttgaagattaagtaacagtacatatgaaagcactggcacaaactcagcagatgtttctttccttgtctgatgcagctttatcctcttttcattttcagtgtctgcagtaaaacccactgttgccccaccactagctgagccaggagctggcaaaggtctgcgttcagaacatcgggtaagcctctgaggaccactttcaggaaagaggcagggggcagtgttgagattagtggagtatgggtgtggtgatgcctacctttgaatgcctggcagctcattccctcaaccttgataaagggagtttaggatataacttcttcatagtcacataaccatcaaatgataggactagaacctgaggtcttctgaacacttgttcagtggttttcctactatattatgctaccagtgaaagccttgggtaagttaaatatttgtaggggtggtagcttagtaactcacccccgtcctcccacgatgtcacacgcttcagagaggtggtttagtgagctctattcctatacttctgggatacttagctgtagctaagggataatactcagtagcaatagctgtcaggtgcagacataaagcctcaaggaagtatggtcaggattgtggttcctctgcctgagaatacttcctaaaaatatgatagcctcgaaagtttgttgctcatgaggttctgttccacaaatagctattcttatgcaaatctttatcaacagaaagtgccctttttcttatgattcttatgttggctagactacactacactacattcttttataaatgggttttggtttttaaatcactgtttctgagccttcattcttggtcaagctttaggcacatctgagtgagtagttttggcctgtgtttgcatgtttttgcttggaggagaaagggccaccacaggaaagggaagcctggagctcgtgtacttagatactgtagtccttggccatctactcgtggcaagccgtgttctttctgactacacggggaatgcttgacccagagagatcagattgtcaatgcttgttccactcttactttcaggagaaaatgaacaggatgcggcagcgcattgctcagcgtctgaaggaggcccagaatacatgtgcaatgctgacaacttttaatgagattgacatgaggtagtgtctctagtccctcttatcccctaggcccctttttcttagagaacacgaacttgccccactccttatctagtgctgattctaaaactaacttgtcagggaagaggtatttgtttattgttttttgtttgtttgtttttgtttttgttttttgagatggagtctcgctgtctcccaggctggagtgcagtggcatgatctcggctcactgcaagctccgcctcccgggttcacgccattctcctgcctcagcctccagagtagctgggaatacaggcgccccccaccacgcctggctaattttttgtatttttttagtggagacggggtttcaccgtgttagccaggatggtctcgatctcctgacctcgtgatctgcccttctcggcctcccaaagtgctgggattacaggcgtgagccaccgcgcctggcctgtttattgttaactttcacagagtgagccgctggcttcttctctaattggctttcctaatactatgcctgcctcctccatgaccttaaccttagccttggctaggtgtagtggctcacacctgtaatcctggcactttgggaggccgaggcaggcggattgcttgagtccaggagttcaagaccagctgggtaacaaggcgaaaccccacctctacaaaaaatacaaaaattagccaggtgtggtggtgcacatctgtagccccagctacttggggggctgagatgggaggattgtttgaccccgtcacttacatattttcctaagtgattcagaatcgagtggatgaaaaggcaaagataggctgggcttgtctttcattttacccagctctgacagtgaaatggaaaacaagttgtgtttttaaataaccttagaatgttaaccaaaggtactaattcactaggtatgcccatttctgtagtgagctaattgttgacttacctgttttcttcaagatttcaatgtgttcaagtatcagcactgtcaggaagagaaatttgacaaacgtgttttgagtgcgtactgtatacagagtactgtactgtggaattcagtggggatagacgctgggcaccatggctcgtgcctataatcccagagctttgggagggtgaggaaggaggatcgcttgagcttaggagttggaaaccagcctgggcaacatagcaagactgtctctacataaaatttaaaaattagccaagtgagggctgggtgcggtggcttgcgcttgtaatcgcaacactttgggaggctgaggtgggtggatcacatgaggccaggagttcgagaccagcctggccaacgtggtgaaactctgcctctactaaaaatacaaaaattacccaggcatggtggcgtatgcctgtaatcccagctactcggaaggctgaggcacaagaattgcttgaacccaggaggaggttgcagtggctgatatcgcgccactgcactccagcctgggcaacagagcgagattgtgtctcaaaaaaaaaattatgtatggtggcatggacctatagtctcagctacttgggaggctcaagtgatcttcctgcctcagcctcccaaatggctgggaccactacaggcatgtgccaccaggcttggccaatttttttagtttttgtagagacaaggtctcgctgtgttgcctaggctggtctcctgaacgtctagggtcaagccatcctcctgctttggtctcccactgggattacaggcatgagccaccattcctggccaaaaaagaatttttaaacaggtcttcaagagtgactagcattttgtcagccttgtggagaaaggtcattccagatgatgttaacagtgtagaccatgagatgggaaagtagaagacacatttgagaaattgtcaaaaatcatttctgttgtgaggattttgtatagcaaagaatggtaaagaaggttggatccttatttcagaatgttttgaatgccagggtaggagtttatatttaattcaggaagcaagtcaagtctcaggtcatctctttctttctttttgtcctgagggtttagtctgcgaatctacttttcattagagaaatttgcttttctttggaaagggtttgaaaaatagggagaagggagtgttttcttgatagtgcgctgtggcattgttcagagtagggctctgtgacctgttttactagatgtcatccattctgttgggaaactttccgaagagactggatgacattcaagccaaagatttctctcttgttcataggatgtaggggaaggaccttgactaatgaatcacaaaggctgcagcttatgtttcagtgcattagggccaaattgtacacaaattgaattggactttgaaattctacccagtttcttaagacaaaacatgtaaatatttgtggccctgaaagatgcagttggcccaacagctttgattggaaaggaagcgtaatagctggatctcctttcagcagctaatcaaggtgtcacttaacaatggcctgcggtcttgctgcagcctaatttggtttagatcgagtgccctttgggtcttgtgctgatcagctaacccataagggacctttctgagaccttctcccttcctctattgtcccagcctttgcctccaagggcagagctctgaaatagaagctacttaatgaccagacaataacatttgggcaggtttgagagcagagatgtttatcacatctctttccctcttctgcagctcttgtgtcttgggaaccagtaatgtctttagggtggtaatcctagcactaaataaggttagaatcaggaaaacaagcattttaaacccaatcagtcccccttggaaaaacttcctttttcaaaaacaaaagatctgaagggggctgttaaaattgtaccacatcttacctttcatgctaatgtcgaattaggccattagagggagaaagggagaactgagcatttggccctgagataaagttaaattcaattttcatcgtagaactgcattactgcattccgataaatactgaggtttatgcagcaaagtgatgggaaagccatttctcactaactctgcaatgtgtcattgaaaaaaaaccagtcccaaaagaataaaggctgctcatgttgtaaaggcttttcagaaggcttgctgcttaatctgaagggaaccagcctaaaccacaagtggccacttttctaaataccaaggaaatcacagccattaaactaatcttagggcaagaactatgtcttaattagctttgtatcttggtacctggccctgaccctcacatgtagtaaggtgttagtacctgtttggaagaataagtggatggaactgccaaccctggaaagatgaagaacggatatgactttccgtgggcctgaaagaacactgggttatacccttccctgcagagtcatgactgctttttcccgcatggagcctcatgtacccatgagctgtttattttagtctccactaatcaagagataggaggaatatcacacgggagttatactcagatttggtggggttttttttttttttttgtattctaacaagaaataaaaagaatattgcttattttgtagattttgtttatactttaaaaaattttttttcaggatggatagctcagttattcagggcaaggatgttggtgtgctgtgtgatctcttgttcatatgatgtgtcactgaaatctgtgacttctagaccatgaaggagccctgtaaagagatcaacccaccttaaagacagattgggcctgattcctgtagatttctttgtaaaagaacagagttactgtgttaacctcaggtagactatttcaaaacttgaactaaggtaatggtccagagtgagggaaaagctctcacctaattgtgtatatggattgagaaacctgtgtgaaagtcaaaatgcaggctttgtggtcagtttgttttgtaatattttcacagtaacatccaggagatgagggctcggcacaaagaggcttttttgaagaaacataacctcaaactaggcttcatgtcggcatttgtgaaggcctcagcctttgccttgcaggaacagcctgttgtaaatgcaggtgagttgcttgtggctggaattggagaggtcctgggaggtaggtgtatgagcacagacctgctcccacatgcagaggatcaacagaccaaggctttttatttgctacctatagaaatatcagtatcttccccagggatttcttggttcaccttcctgaagcagcatcatgattactttctacccgccagctgggcagaacagtttctcttcccagtgtacagctcggcagctgctcaggcagcaggcagttctgggatagcccagctctccaggctgtctcctgtcaaggtggaagcacgtgttctggcttcctcccctcccccagctccacaggccctgttaccttggggcctgacttccacagttggtgtaggctcctggctgacctttgatcttaggtcgatgggcctcactgggagcttcggcttggcctctcatggacctggtgcttattttctttcctttttacttacctacgtcattgtagtgttgacctaacaagcactttgttttcctgttgacacacttctctgttccttgggagattggagaggggtcagtgctacttttgccatcctcagcagtgtcaggggccctaaaggtctagaagtagaagccctagtccctcctgttgagtggtgctctagggaggtagaaggccatctttgttttgcccaaatgtatacctcttctttttcccattcttctcatgcctccctgactggctctcatctttttcagtggcccccttctgcttgcccacacatgtaggcggctctcaaaagttctcgtggcctctttttcacattacatgcttcctctggatgtcttatctaacaatacaacatggactttctgcggaaatgattcccaagcctttattttcccattagttgctaggtgtacattttcagatgctggtttgccatctcttgaggtagcatatttcaaagccagatcaccccgcttactcttggatctcccctcttcctcttgttgagagttggaagcagagaatgggtagtatctctatatcccttttcctttgctaatttgcccttttttggaacatttgttaaccctagtcattctctgctaaaggagggcttgactagagctacttaacgagagtttagtgcatacctatcctatggaagccagtgtgttgagcccttcttagggctgccaaagaaatggatgctcctatgcccaggctcagtcagggacttgggagatactatacttgggatgggagtaagtggaatgccagctgccatgcataatgcagtggtgttcatggtggttggtcagcccacactgtatcaagctctgcagatttttactctgttaatgcacatattacctcattagtcttggccttcctggggagttgtatgtaacatgtattttctctctcatagtgattgacgacacaaccaaagaggtggtgtatagggattatattgacatcagtgttgcagtggccaccccacgggtatgttggggcaggaggtggggaatgttggtcttagaccctcaccttatctgtgtgaaggagatcacacaagagaaatcatttctttaattctgtatttttagaagggagttagtaaaagtaaccttttttttcttttaaaccatgccgcattcttttaacactttctgttaatcacactgagtaatgaaggtattctagggagggcataccatgggttgaatcaagggagttgttaactataaaaggtactattaatttgcaactgaaaacagcttttcacccccttcagggtctggtggttccagtcatcaggaatgtggaagctatgaattttgcagatattgaacggaccatcactgaactgggagagaaggtaaagtagaaagatgtatacaagctgctaagcaggcgagggaagagagccttcagaaggctgggctcactagcaagcagtgctcatggaaagtcaagtgcatagcccctgagaaaagcagttgcccatgagagctaagtattttatatatctggtggagtttaccatgctctggtaactgaaatctcatcagatgagacctgctagaaaagatcatctttgaagtcttcaactgtatgaaattgtgccttttctctggtggagcactggtcatagacaccttagccgaacaactgtcacacggaagctagcgcttgtgccatcgatctcgatacaagctttctggacttcctttgcttttttgtttttagaggcagggtctcgctgtgttgcccaggctggagtagagtggtagagtcatagcttactgcagccttgcactcctgggctcaagcgattctcctgcctcagcctcccaagtagctgggactacaggtgtgcaccaccatgcctggctaattcttaagttttttatacagatgggggtctcactatgttgcccaggttggccttgaactcctggcctcaagcagtcctcctgcctcggcctcccaaagcgctgggattatggactgactttaggtgaaggaaactgggttggcttgatatttcaattatgaaatctgtttttaggcccgaaagaatgaacttgccattgaagatatggatggcggtaccttcaccattagcaatggaggcgtttttggctcgctctttggaacacccattatcaacccccctcagtctgccatcctggggatgcatggcatctttgacaggccagtggctataggaggcaaggtaggaaccgtcacttctaaggtcctagtggctaggtctcgatgaaagggaaatccaactaaatgctaattgtaaaacattaactataatttcaggcctaagttccatttcttagtttctaatagctaaggcactgattatcaaattgtggtctggatcagcatcatctgggaccttattagaaatgcatattcttagaccccatcccagacttaaagaagaagtgcagatgatcctgatgcatattcaagtttgagaaccactgagctgaggaggcttgtttgcttctatggagtgggggatatagttggaaacgtggtcccttgcccctgggaaacagatgacaattatgcatgtcagtctgtgagctgccaagttgtatgataaagcttgtaaatttcccgggagttcagagaattaagtattaaaaggggcttgagctggcccttagaagatacgttggtatcaaaaaagctttctgggaactcctgtgtttagaatccttttgggttactgactcctgtgtgaaaccacagtctgtagatcttcctggaaaatgcccatacacccagctacacatacaattccagaatttgtagaccctggcttaatttttttttttttttttaaattctaaccccagagagaagcaagtacaggcagccagaactgaagggaaaactttccttgtaggcagcagatgcgttagagggcagagtatgtttttaaaaaataaaaggcagttgtgagaagacagttttcttggcaaactttgtttctgagtggggaagctttgcactgagggtaagtcctggtctttgaaatactgtaaatatgcagaggcaacatcaataggaaaggctctggaattaggaactttcttatgggctgtgctaaatctccttcagcgaggctggctgtggcttgctggagacaaacctatttacctttcctctctgtaggtagaggtgcggcccatgatgtacgtggcactgacctatgatcaccggctgattgatggcagagaggctgtgactttcctccgcaaaatcaaggcagcggtagaggatcccagagtcctcctcctggatctttaggaggaacccacacaccctacaagttgatcatgcaggaactgaaaaccagtcttctccctgtcccctcatgggtcccgggttagcctggtgacaggcagacacatgctgttggcctcaagcaaggaagcagagcactgtgtaaccagcagtcacaggtcttttcttggcgttcctgccaggctctccctctctgcacctgtctcatagcctcgaatatcttaattccttaggcttaagagagagagccttaatggatgctcattcatattcctgcctttcttccatcagctctctgcaaagatgattttgcttttccctagtgctggtatactatagagaaacccctggggaccatgtgattaagttcctatcttttgaaagtttgttctgcagagacttctaggaggatgctgtgcctcccaagctcagagcagcctctgtcctggctgtgcacattctcccttgattccacttgtgtggagggattgaacacaggcaaagaggtgctgctttgcttcttcaatggcaccttcattctccgttgtcattgacttcaagatgcctcttctacctcttccaggaagcacaggccaggggatctgggtgtgtgagtgggaggagagggcagaggtcccctgaggtcatgcattgtaatcatcatagaaggagagcccaggcctgccctcacgctctccatcataggctgacaccaagaagactcgtcttggcacaatctcacacagctggggctgtagcaaccctttccaacccctttgctggttgctgggcctcattctagcaccttgttcttagagcagattctagcacatcatggcagtgggaccaagcgtggtcccgaggaagggccagagcctggtagagactagggaagggaggtctcctctagactgactcacattgccttgagcttttcagttaagttgctgtaagcacctgggctgaggaggcagtttttgttccttcctgcgttatagcggggccttgtctcttcctctgcaggacacagatctggaggacgtggactggggtaggaaaccaccctgagggtgttagtacctagtggtgaaacggatgaggtcatttctaaggtgtgttgcccgtggatctgggcacaatcattggaattccttggagccactgggattcatggctttgtatccaactgcatccaggcctgaggctgctgacgtttgacaccagggccagtagagagtgcccttttgtatcttaagccaagaagtgaggcctgggggtgggggaggggggaaggggtgggagccaatactgagtgcctgcagcatctactactctgtcttcactattcagaacttgtaactaaagtatttaaagaaactgattttaaatgcaaattaaagggcagatattctcaaacagggttcctgtatctgttccttttggctactgaggtggtacaagtccccagcactgttgcactgaaattattgaaagccactcaaggtcctgttgcttattttgtgaaatcagaaatcccttatgtggaacttaacactcataatttgacagaaggtagaaccctgactgccagccgggaaagtgttgccaaaaagagtcaacctctgtaaaaatatttgaagagatttattctgagccaagtgtgagtgactgatggcctgtgatacaactcttaggagatcctgagaacatgtgtccagggtcgtctggctacaacttagttttatacatttaatacattttagggagacataagataccagtcagtacatgtaagatgtacagtggtttggtctggagaggcaggacagctcaagacctggggatgttgtcataggcagaatcaaagattttctgattggcaattggttgaaagagttattatctaaagacctggaatcaatagaaaggaatgtctgggttacagtaaggggttgtggagaccaaggttttatgcagatgaagcctccagccagcaggcttcagagaaaatagattgtaaatgcttctcatcagacttaaggagcctgttttaacagtaattccaaaagggaggggagtataatgaggaatggctggctccctcttcccaccatggcccgaactagcgtttcaggttaactttggaatacccttgactgagacgaggggtccatacagatggttggggggcttaggatgttttttgttttgtttccataaagcatcatagtctcttagtgccccaccttccttgagcctgtcaagccatactctagaatagagaatttggggtcaccatctttgtgaagccctttcaaaacaccagtagacttgcattttttgtgtgggcttacattatttcagtgatggatttgggaggagtgggggcatctcatttcatttggatttgatagccttgtggaccaagatgctcaaggtcaatacacatgaacaggtgagggttgatgacctaggagcagtggtcagtgagcgtgagtgtacagggtgggtagctaacctagactgcaggtggcaggtgtgatggagtccaggcttaaacacagccttgtcttttccagagtccctgtctgctgagctcttgcagtgaggccatccctctgtgaaggtctgtcacaggagggaagtgggtcccagagagtagaactagagctctagtagatagaaaaacaaattaggttgaatgaaaggaagaacaggatttggtgttagaagctttaatttatctatctggtaaacctgcaaaataggcattatttaccccattttatcgaaaggaggtcgactgtaagagctgggacccacagtattctaaactcagggcccaacaaagtgtcagatgtgtagctttgggtggatgaagcacagaagttccagaagggacttgtgcttcatgaagcggtggttggaagtggtccagcctgacttagggagagtagcagaaggaacactaacttgcaactctggctaggttgtgtccttaacctttttgagcttcagttttctcaggagctaccgtctgttgcaaggggtcactgtgaggatgaaactggtattcccccaggcaccatgagcctcttccaaggcttcttcatcctcttccccacagaacctggtcctccccgaccccaccccttcccctgaggcccacatggcatgctgctcaccaccagccctgcgtcctacttcctggcagccccaagctcgctcttgacttcactctggagcttctacaggggagccttccaacctgccccaatgagccgtggtcattgcatggaagaagcgagaacaccgtaggccagagcaggctttattggggccgtgtaaaccccagggagaggcaggacgtggaccacagagagtcatgtacaggctgcgctttcacttgtcttctctgtctcagtctcctgaagagcccgaggaagtcaagtctccccaccatgagtgaggggtctggtctgacagttgggccttcagagccaggcacgtggaccgtgtcagaagcgccacctggtggtgactgggatgctggcagggaggagctgagggcaaaactctagtggaaatttcccaggtcggtcccacgccccggtgacagggtgaaccctgagaggagcccccaaactggaggcaattgtctttgaggtaaccactcaccccagcttttcagagaccagaggcaagacatttctggctaagagccatggatagttgttccatgcgttttgtggtttcttatcccaaaagggcatgaagtcacagtaggcagtgacatggtaaacagccagggcctgagagggagtcctgatgggcacaccttgtctaaactgctttggcctggaagctgaattgctgtcctcttgcacccctggggcaggctgcccctcttcccccacacaggcccactggggaggaggactcttgattctggtttcagacttgctctaaggggcagacccatgcattccttcctccccccattactcttattttcttcccctcccttttgctctcccaagtctgaaatcacaagatagggggcatggtcaggaatcgggggtgggggggtgggggtgggggtcatcctgtcccctacctcatccctccctgcacaacagatggcatccctgcttctgggcctccccagctgcacgaacagcttctggtggaagaggcctactcgctgtgtgactaagaggactagccaggacagtctggtttgggtccactgagccagtggatcagtgtcctgagatgagtctccagagatgtcctgagtggggcacaacatggcagtgagtgagtcacagaacctcacagtagggtgcagcaggtggtcaacagctcagcgccagtgccacagaaggcaacctttaacatggtgagtccacatgctcaacgggtctgttgactgatgggtagatggttcaagctgcttagcagggcaagccttgactgcccccacctccagcttttccaggagctggcccttcctgggtggtggccataattctgaggccccagtgggagcccagcaggacagacagtgccctccattcctcgcccaaagcccgctgatagagggccagccctgggttgggtgtcaggcaaggaggagaggcgatccagaccaggccagctgcttccgtcacccgctctgccctcttaccccaccagcttgctccattggatggtactgaaaaagggatgggacttgagtttgctgacaccaccttctcccatgcccaggcgccgggtaggctcgaactgcagcagctgcagagagaggcccagtcagctgggccactccagctgtggaggcatggggtgacctccagggactccaaccactatggcctctagggggcctgctccctggcagcctggcccacagaacccccattttaccctgggaacattggtggtggttggccaccaacatatagaaatgtgttgcccctactgccctctgcacccacatcagacactgagcacgaagcacacgtggttcagacacagttctgtgcccctcccagcaccttcctcaggctaggcagctgcttcctctggccgggctacacctcacctcagtcagcagagaggccgctgggcgactgagccactcgggcagctggagctgggtgtgggcctggattcctgaagggtggctctgggacagtgcctgggaggacacagggaagggcctctgaggaggcaaccccaggaccgtctacactccagtggcagccaggattttttttccccatgtcacagcccatgaggaggatgacaataatgatagttgctacagccagacacagtgcctgatggctaagcagtgcctttatgttatccacgaaaggcaagaaacaggcccagagaggtaaagggacttgtgctgagttcagggtttgaacctaggtctcttggctccaagcttgctagaagcaactatcttgggttgcaatcagggcaggcactcttgggaatagtgatggaacttgtctccttattttaaaaatccacacgggctgttcatttggcagcaggccatggcatgctaccatcggggccaaggcagcggcgtggcaataaaagaaaataggacctctccacaccccagaaaggcacagctttgaggagcagagggtctgtctggagggaagtatgagcttccaggaacccccaggaggaaggccaagagctctgggctggagaggtgggaggagacaggaaaagagagagccactctgggggaaattgcagccaggactttcgggaccccgtgccatgggacgaaagcaggagggagcctggatggactggtcagctctggacttcagttcacgctgcatccatttcggctatttcctgctcaaatgcaatttggcctcccccttgctgcctacataactggcctcagttgcagtgttcagctcatgaggggaggacagaaggcagagccatcaactgttcccaagagtgcctgctctgattgcaacctgcaaacacaggttcccggagtgtttgcagggggatcttttgagctcttggctgacccaggctggacagggcagctgcttgcctgggtgaaagagcccctctctcccatcctccagctaaggtctgggggtgacagccaacgaggtcatgggtgggaggagtgaacagcgggctcaggatgattgaacagccttccagggaagaagggctgtgtcacattccgcgcttcctccaaatctgacaccacctgggcccaggctctctggcagaaaccttccctgaccatcccactctactcgtattcatagaagttgacagtctccttagctatagccaactaatgtgttgggagtgctaagtgtgtccctggcttcgggggcagttgtgctggtaggacagccaggcagtctctgcccagactggctggatggactaagcctggcccatcccacactcagtggcacccaccagggcactacacccagcccagccactcaccattcccgtcagcagttcatacagtagagacccaaagctccaccagtcacaggcttccgtcagctcggaaatcccacccacctctgtgggaacaagaacacaggtgtcccagcctcacctaagagggcctcttccattctcctcagcctacccagacaccacccacccgctctgtcattctcagactctgggcacaacccacacaaaggcacccaggtgctaaggcccaccctggcctccccccttcttgcctggggcgctgtagagattgtccacggcctccccgcagcactggggctccacctctgaccactggccaaaatatgtgagccggatgtgacctccagtgtgtgggaggaaaaaggaggggacagattgaggacagctgatacaggggagggggttgcagggcttcccccaacagtcatgcggtaggagccaatggccttgctgggcagaaactcggcaggggcacagcaccctccacagaggcacagcactctgaggcccacagagcccacagggtactcccaggagcctcggccaacagactccagcctaggccccctgaaaggctggctggggccagggaggagcagacaaccttggaggtcccctcgactttggggatctctcgtcctctgcctggacgctttgggggccaccccactgaggggtgaggagggcacctacctgcctggtccaggagcaggttcccggggtggaggtcccggcacagcaccccctgctcgtgcagcgcctccagcgctaccagcatctctgccgcccactgcttcacctgctcctctctcacactccaggtggccctgccacagccccggccggccccatctgctgacaggcagctctgatccatgcctcggccacagccccctagcaccgggccggccccctcaggaacccaagtgagcccccgagggggcccagcgtctgagttctggccagccctcctagcttgaaggtgcaggtggccacctggggcctttggaaggtccgaggagccagaggtgctggtcctggctgtgggttcaccttcagcctccctctggggtctggtggatggggcctccccagctaggagaaggttcggagaagtcctaggaggctccagggcgattctgtcctggccaggggcatggcctgagggaagcctcgctggggtcaggaggttgaggtgggggttgagctgagccttcatcctctcctgggtagagccagagctgagcccagaatgtcgggagtgcgcctgggagagcaggtgggaccagagagtgcctcctgggccatgcagagggagcggtgagcgtggggacagggagaaaaagagtatggatgccagggccggctcccactcctgcctcccttctgtcttgggcgcagactttccgcctctgggtgtcctggcctagttcagcccctcacctctgctccctcccacccctcagcttagaatgccctctgccctcctcttgacccaactaaagtgggcccagccttacaaactggcacaccaccgagagatgtccagcactatcagtgtctgtggtttgggtggtgggttcactagtgtgaacactgtttttagggagaccgatataaagaaatttaaagaaaagtcaggcacacacttatgatgactatatgtcatgaccccagatgtgcacctcactttaaaaagtcatcaatacaaccatcagtatctgctacatggcccagttcctgtcctcataacttcagtcaccaccaccctgtctggccactcccaagggatcggcacaacccggaaaaatgaaaagagccaacgctggaggaaacagcgacagaggagacagctgtgattctcacgcccacccacgatgtggacatccaccccaggatgtcccctgcccccttggtaccacacaggggcccacaacagcctgactggcctccagaaaggccgggtcccctggtctgtgctgtacatctggtgcaagctccgcccctccccagggctcagctttttttttttttttttttgaggcggagtcttgctctgctgcccaggctagagtgcagtggcgtgatcttggctcactgcaacctccacctcccgggttcaagccattctcctgcctccacctcccaagtagctgggattacaggcacgtgcaagcacacctggctagtttttgtatttttagtagagacagggtttcactatgttggccaggctggtcttgaactcctgacctcagttgatccgcctgcctcggcctcccaaagtgctgggattacaggcgtgagccaccacgccctgccagggctccgcattttaagggttgacgacataccccaaaggcctggggagctgacagggggccccaggcctgctcaccttgcacatgctccaggtgcaggaagatggagtcctcgctcacaaagtacctgagcagcttcgtcatgtaggggactccgtgtgggatgatggtcagccgctccctgctcaccatgtggcacctgggtaggctctgggagcagcagggcaggcagatcagccggggacaggccagagactgctgctgttaggggacctcctagccctggcttcaggggcacccgaatgagggtggagcaactgcctccctcagttcctgacctgtccttacccccactgcccctgtagaatctgggtcctccaccctctagccaaagagggggcagtgtgtgtgcatgtgtgtttgtgtgtatgtgtatgtgtatgtgtatgtgtgtgtgtgcatgcatgtgtgtccatctggaaagtggggcatgttcaggcagaacaaccagcttttgtgggagggagtgcaggcttcaaatgcaggttctgggtaggagtttccaagagccctgagaaagatccaaggggaatgcagagtggcaggggcagggtggcacctgccttcaccacaaaggtccctccggttgccgggtcctggaccagctgcacctgccaaagtccaagaggcactggttaaggcaggtactagctcctggggctccgtgaccccagcctgaccccctcccaggttcctccactgaggctgactcactccagtggcagggcagggagggcgggctttggtggcactcctgaagcagacatcgatcctatcctgctcacccacccctgctagacctgtggtctcagatgctgcctcctccaggaagccttcccaagattacaggggctggggtccctaatctgcctccaatgctctcttagttcacccttaggagagcctcttcacactgtctaatctgtctcccactggactgtgagctcagtattcccggagccctgcacagtgcagggatgtagtaggtgctagacacatgcactgtgagcagcccgggccttggctcactgtgtgcgtggtgggcatgcgagcagaatgccctgccctctccctgcccacgctgggccaggcctcatgccacctgacgggagggctgagaagccctgttccacctggaccccagagatcagctgagaagccctgttccacctggaccccagagatcaactgagaagccctgttccaactggacctccagagatcaacccctcacccaaggccttagctagagccccaacatcctgcagggtctgaggtgtcatggctggaagggacctcagagccagtcacttcctctgatctcttgttttacaactgaggaagccgcagctctgaggtgactccaggtctccccagcgcagccatgttgtgtgggcttggcacgctgcgttcaggcctttttcccactccactccacccccttcatttacacacacccccatgacacaagtttatctatgtgaaaaacctgcacatgtactcctgactgcaaataaaaatttaaaataaataagtaaagtccgcttgagaggccgtctttggagagcagcctctccttcttgtgttggtttccattagaggcagacgctgtcaatcgcaaggtcagggccatgtttggagttgggcccttgactcatctgcatggtgggcaggggcgggccccagcataggagcgggcacatgggtacgtcgagggcgggaaggcagaggattcagcccaggtgagggcatgtggaggcaaggccagcaccctggggttgtgactccttggctgttggcctgccctgcggacattccccagggaggctgtggccagccatggtcggggtgggaactgggccctgaggccaggctgctgggcagtgaggaaggccacagcttgggatcagggtaggggaaggggcactgggcttcgatcctgggcaaattgaattgattttctcatctaccaaccaggaattccaaatgcctaccttccctacatctctggattgttgaagccattctgaaagcccttggtgagggccaggtgtggtggcttatgcctgtaatccctgtaatttgggaggccaaggcgggtggatcacctgaggtcaggagttcaagaccagcctggccaacatggtgaaacctcgtctctactaaaaatacaaaaattagctgggcatagtggtgcccgcctgtaatcccagctacctgggaagctgaagtaggataatcacttgaactcaggaggcagagttgcagtgagcctagatcaagccactgcactctagtctgggcaacagagacagactccatctcaaaaacaaaacaaaacaacaaaaaacaaaaaaccaagaaagcccttggtgagtggaaaggctgtgagaatgtcagtgatcacatctgccaagtcacatggcctctctgaaccttgctctttttaagtacaaaacggggtcatagcagcacttccttcagggggtcctgaagaggattctgttaaagcaggcaattcaggcagagcagcagcctgcacctgccgcagaacacacccttgataacctgtcgtgattattaccagtgtcatccgaggggaagcccaccctggctgtaaagtggttactctgtgctaagcactttacataggttgtttaattttatccccacaatcctgccaaaattcaggcctgagcctcagagaggttatgttgcctactgtcccactgctaaaaagtggtcaagtcaggacctgaacccagacaggctgatcccggagccctgcagactttactggaactgggggcacaaccaggtgaccctggcaatggccttccctcctgagcctgtttctccatcatcagtgaaaggaaggcagtggactagatgagagcgcccaggacccttttctcagcaggagcgaggtgtcctctccaaccaccagaggtctctcctccaacagccagagaccgagtccagcctgggcttggctccctgaccaaacttgtgcaatgttagaaaaagcaaggaagaaaactctggagtcatttaggagaacagagtttcccacaaatcctgacaccccagataattccccactgtcccttgccaagtgggattccccaccacctggtcctgggcaagggcctgtaactgacagagtccaaaaaaactagcgaaggagggaaggctgaggaggccagaaataaaccttgatccatacactgaaagatttctgttaaaaacatattaaaaccaacctcagtattcagaaataattagactaaaacattaacagtgattatcttggagttcggcaggattcaggggattttctttttcttctcctttttctttcattatatttcaaaagggcagcaaagcagcaggcattttcccattcatccaaccaaacaagaaactccttttactcagtggtttggaggatggaggactgtctagtgccttgacttctttgtttattatttatttttttgagacggagtttcactgttgttgcccaggctggagtgcaatggtgtgatctcagctcactgcaatctctgcctcccaagttcaagcgattctcctgcctcagcctcccaagtagttgggattccaggcatgtgccaccacacccagctaattttgtattttcagtagagacggggtttcaccatgttggtcaggctggtcttgaactcctgacctcaggtgatccacccaccttggctccccaaagtgttgggattatgggtgtgagccgctgcgcccagccccgctgacttctttgaacctcagtttaattctctgtaggacaagtattaaaatgcagcactgtccaattgaacttcttatcatgatggcaggattatatgtctgcactgtccaatatggaagccagtagccacatggggccattgagcacttgaaatgtgactggtgcaactgagacacagatgacttcattttaatgaatatgaatgcacagaggcttatgtgcctagtgactactgtgttgaacagcaccctataaggcttcgttcccccatggtgactgtgaggatttaatgccacagctctgtaaatgagaaggttccatacaactgtcgggtgagccttccatttgggaagatggaaggcagttctgagtgctttctctcaccttttaaaaaagagcaattgttttaaataaagagacccactgaattcttgggacagagggacaattaaagctttggtgaaacacggtaaaccttttctttaaagatgcacaaagtatcaaaatcccaggaggactctcccatggaacaaacaagcctaaaggtttcaaacaagttcttaaactcaaaggtccacaggggccaggcatgtgagcaaataggcagggtggaggcgcagaaaggagggctggtgccccgtctaaggcaggcatctcctcctccactccctgctgccacaggggaatgggaggccagcgtttccagatctgattttttcaagagaagcaggaaatctggacttttataagaatctgcacattttcaaatgttggtaacaactaaaaaaacccaaaaaacaaacaacaaaaaaaacacccctgtgtttaagccaaataaaagaagaagtgacttggatgaccttctttttcttcctccaccctgtctcagagcctggctcctgcacgaggctcagcaaatacccggtgatgtctccctggcccccaggctctgaggccaggccctcgggtattctggctgcttgccaagtcccgacccacccacctcactgctccctgccaccatctcttcagcccttagttatcctaacagccggacacgttaggggtcactcaagcatcatcccgagcaagccctttgcttcctccctgggcctgagggttgctgctggctggcactgcccacttgcccagatctgtctgggcacagctgtggaatggaacaagggtgacagtatatccaagtctggctgcagggacccaggcccaggggcagtaacacctttcctaatttgaggaaagtgatgctcctggcttgggcatgacacagggaaaggaagtaggatctcaggagggaggtgaagtccttaagttgagtacccaagacaggataaaaaagaaaaaaaagaagggtagtcctgaaatagaatgcggcgggccactggctcacgcctgtaatcccaagtgctttgggaggcctaaacggaggtggaggatcacctgaggcaaggagttcgagaccagcctgggcaacacagcgagatctctctacaaaaaatagaagacaatagcagggcttgagactgtggtcccagctactcaggaggctgaggtgcgaggattgcttgagcctggtaggtcgaggctgcagtgagccgagatcacgccactgcactccagcctgagctacagagcgagaccctgtgtcaagaaaaaaaaaaaatggttgggcttggctttaatttgtgctttccatctgcaggggcctcgaaacactggattcctaaaccactttcctgaggctaaacaagtttggggaattctgtgtcacagtgtacatctgcacctaaacactctaagaactccgatcattaagaaacaaagccatataacttcaactcgctgttttcctatcatactcagctcagaacccctctcaccacaacacctatggttcagcgggatcgtaccgggaggcacggtgtcagtcacctcccggccagtccctgggaacggctgtgctcagccaaggttgggtcgtggccactgacactcaagcagtggggaggggaccgtggcagatggaagctggcagggcctgcgctgacagtctgggacctgccccagggacccaggagaagcagctggagtaaggcccgggagcagaagcctgcgtgcctcccagctcactcctgtcacttgtatttagagccatcaagcacgtactcagtgtcacagcatgtgccaggtctttccccaaaattgttttgttttacctcccagatcaccccattgggggagaattctcatctcactttccagaggaagaaaccacagctcagagagcagggggcttgcccgtggccacccggggtggtgcccagcgcggggccttccctcaggcagcatgtcatcctcttgcctgtgggaagtacaggactgtctccttttctctgtgggcccccagatctaccaaaatcacccagtgagtatgttaaataacagattcttgggcatctgtatttttaggaagctctccatttagccagcttggtaaagaacttcttgggtgactattccagggttcaggggaagaggggaacctcatactggctggactctgatttgacctcattgtctgtccttctaatcagaagcactctaacaatgagtgccccgagtaagggttgggacgtcgcctcctatcttcttgtctgccctgaataaggcaaagcatgcgagatagcattgggacagggtaaagttacagttaggtcaggagaggaaaaaaagggcagacttgccaaggccctgggcaaggacgggccagaacgggccctctctggacaggtttctggagttgagcacgtcccagccgcaggaagtccccagctgtgctcggtagagcgtcttggctgcagccctggggttcagggtgagtgtggtgggggtgctgtgggaagcgggaagtgggagtgagcagggcctcgaggactggcagggtgccctgggcatagctcctcgctcctcctgcagtttctgtcccaactctcccaaggagcaggttttctggatctgagctgcagggctgtggaaagggcctgtctgcctcttctttttatattttattttattttattttatattttattttatttgagatggggtcttgctatgttgccctggttggcctctaactcctgggctcaagcagtcctcttgccttggcctggtgcttggcccaaagtgctgggattccaggtgtgagccactgtggctggccaatcagcctcttcccgttccctgcattttcctccccaggacccaggaccaaagtcatgcgtgttagggatgggggagaggtgggaactgctggaaacaactgcactcgcactccccactgacccctgcccacctcctctggaggagtgggggccactgctacagacctgctttcagcatatcatgtctctctccccaccgccaccccaaattgcatacactgtctccctcctgcaaggcgagtgtccactcactcaccttctcgatgaccccgaccaccctgcagcccctcagctgctccacggcagagctcagcgtgcgaatgggccggagcctcaggctgctgaaaccctgcagaggagggagacaggccacacacagcctcagggccgagccctccttggccatggccttctcaccaggcatcaggcaggggcttctggatgcaaggagaacagctgggagggcaggggtataggcaggccccaccccacagtggcaggctgggtggaaaagctggcctttaccgataggcacccatactggtccagggtggtcaggccgacctctctgctgagcccgtccaaggcccatgaagttctctgggcttcagaagccccctctcaaaagccccatctaggccaggcgcagtggctcacgcctgtaatcccaacactttgggaggccgaggcgggcagatcacttgaggtcaggagtttgagatcagcctggccaacatggtgaaaccctatctctactaaaatacaaaaattagccgagcatggtggcgcctgcctgtaactccagctacttgggaggctgaggcaggagaatcgcttgaacctgggaggcggaggttgcagtgagccaagatcacgccactgcactccagcctgggtgacaaagcgagactccatctcaaaagatgcagatgctcccaaggtggggatagggaagtaacctgggaacgtgtgagtctcagggaacgtgccttgaagaccaagcacctactttggggaaaggcagccgtacaggatgcagtgagccaaggagggctgcgtgagtacgcgcaaccgtggggtaagaagcgtgcgtgcattttccaccctcactgaacacttactggtttagagaaagccatgtggggactgtgtgtgtgcacatacatgcacacagatatgtgtgtgtgcacacaagggtgtcggggtctgctccaaattgcatgccggttcacaagagacagaatcaggaggctctgagtgtggacacacataagcgtgtaaattgaacggtgtgcaaggctggcagatgtctatgtgcacacatggcaagtgctctgtgagggaggcagacgactggagatgactcagtgagttgtttgaaaatgaatgaaccatgaggcgtgggagagagaggaagccaggaggaaaagaagatgggccgccctggcacactccagcccaaataatgacttccactgccggcctctgccctgcagcccagggcgggcctgtgggtgtcggggcctccgcagtctcccctcagagccctcctcccgctcaggcctttgggtggggggggtctcctcaccgcgctggggctggctccactgctcagcggccgctgcaggtggcagttgaagatctcctctgcccgccgcaggtatttggtaattttcagcttcacagcctcacgtcgctccttgttggggtcaactgtgggagacaagagtcaccagggtccccagccatggcctcggagggctggagttccagctcccattgcctgccctctaccctcccaaggagtgagctcctgtttctaaggctggttcggcagattctgcccccagattgcttcatgagcccctcctctggggtggggggccagccaggaaggaggaggaagggagctggcaggaggaggttaggaaccagggtcactcctcagcagacagcacttcaccattagcacccaccgccttgctggcggctgtcacaccctgggaagggacagggtggggatttccccatccattttttcagaggaggggatagaagattccagagagcattgcttcttccatctctgatgcccagtgtaaagaaggctagggtggggaccaggatcgggggataaaggaatttgctggacagactggaagcccaggcttgaagggtctcttcagccagagggcaggaagggcccagtgcccacctcaaggcctggccaccagggcccacaggcgtctcaaaatggcctcagcaccagcctctcccctgacatggaagttcctcatgctgccctggagggacctcccctctcgcctctaggccttgaatgttctttctggaactctagccagttcttcagctggataacgcacctaccattctccagtgctcagattagagatctaacatctagaaaatgctctaggccggcccagtctgacctcagtttccctctttcctctcttcacttccccactaatcctcttcctacctgagactataatggtccaaatcaactcatcagtctccccccactagaatgcaaactcccagagggcaggagcccagcccagctccaggaacagtcaggtgtagtgggccaagtacacagcctgtgaagtgaaaccccaattgtgccatttgatagctgtggagccttgagcaagctactgaactgccccatgcctcagcttcctcatctggaacatgagaatgtaaaaaatggttcctgtgtgcttggaacaacatacaacaacatatatagtaatttctattactgtgacactcaaatgaatgaatctacatgaagcccttagaatagtacctggcatgtagaaactgcttaataagtgccagctatcattgtcttttatggaggccctgcaggccagcatagtgccgtgctcactcagtacaaatggacaggggacaagacagatgggtgacaggaagagccctgcactggcccttccccacccaccccagccctgcccagccccggtcctcaccgtgtatgccacggagcagcacgtccacgccattctgatagtggttgaaggccgcctcatagtcctcactaacatcgcgctccagggccagccggatctgcgtggccgcatccaccagatagtcacgttttgtcatgtcaggcactcccagagccaccctgttgcgaatctgctccaggtacacgtgagcttgggaccgtgctcgtgagcaaggctcaggctccaggccggggctgggcaggcactcacaggccaccaggctcatggctgccctgcagctgggacctggaatgggcaaatgcattagggaggacctagctggtagcaacacccctatccgcaccccagtttcctccactgaatgtcagggagactcatattcacctccaaagactgaaggggtcagagctaaagtgggtaaggtcttttcatggatccaggtccttcctaagtggtggtaatgatagaatcataaccagctcaggattctgttttcttttcttttttttttttttttttgagtcagagtctcgctatgtcacccaggctggattgcagtggtgcgatctcggctcactgcaacctccacttcccaggttcaagcaattctcctgcctcagcatcccaagtagctgggattacaggcacttgcctaccacacctggctatgttttgtatttgtagtagagacggggttttaccatgttggccaggctggtcttgaactcctgacctcaagtgatccgtctgcctcggcctcccacagtgctgggattatagacgtgagccaccgcgcaggcctggggctctgttttcctttccagtcaaattcagttcagcaaacatttctggagcatctggtactgtgttgagctctggagagagctgaggatatctgtgatccacagccaccttcacagggcctccgtagagcaagcttggtatccagtacgcattcagcacatggaggccacacacgctgggctcaaatgctgttcctcatgctgttccctccaccctgcctgttgtctcctccctgctcctcctgtgggaatctcatttaccctttggggtttagcacttctccgtggaccggatggattgcccctgctgtgttttgttcccttggtcctgaggtcagtgtggtcagcgagtgaggacccctcctggagccagcagagagcagagcacagagctgggctgtaagaactgttggcagacggaatgactgagtggcagactcggtgccacgttggatggggggtagaagagggcagggtgacccagccccagggagggtcgctctgtcctcctggctttacttttgagaaggtcatgtggcctccaaggacctgacagcagcttcttcctgagcaatgtgtgacccaggcggccaaagggatgacagccgtggctgcgggaagggaaggggctcagagagaggcccacaaagctaccccgcctttgctctcccaggtcccactgggaatgggcaggacccggaacttccaaccccaggtcatttggagagaaagaggagagagcaggatgggcggtggggcggggagggagacccacagcctcagccggcggggagctgaatcccggccaggatgcggccaggaggcagagggaggccgcaccatccctgctcggccaagcccaggggaacttgaggctctgaggccttgctctggggggtgcccgggtaggactggcttcagggtccaccccgccgggcagggtcctgccgggcagagccgccggccccgcctggacacagaaagcggcgcgtgcaacccacggggccccagccgcaaggtgcacggtcccagggtggagggacggccgagggggcccctcgcctgggagggtggagaagggaccggacaaaacaccgtacctgcccgagctgggagccgggtccgcgggccaggcctccccctcacgtaccggcccttcacgccagagcgcgccgcgggccgctgctttccggcatccagcgtgcggggccagccggtgcagcgcggccattggctgcggatgagctcatacttgagccttagaataaaccaccaatcaccgcccggctcggctcctgccggccttaaagccgcaaggtctgcacggctgggctgtgaggggcggggggcggtttagagaggggagggtgggatgggatgtggggtgggtggggagagcaggtctagaatcatccagggatgcggaaggggctgcttcagaaatctagacgtgccacttctaggacttttctcattcattgcttcattcatttattcaacgattcaatgctatgtattgagagtctcccatgcatgaggagctggatgttgagatacagccgtgaactagacagcgctgtttacatccgcatggggcttacagtctagtgagggctaccgagagtaaagaacccagcaatagaaggcttttgatatcagaaccgagcttaaaattcaagacataggccgggtgcggtggctcatgcctgtaatctctgcattatggaaggctgaggcgggaggatcatttgaacctaggagttcaagaccagcctgggcaacataggtagacccaatctctataaaaattacaaaatttagctgggcatggtggcgtgtgcctgtggtcccagttactcaggaggctgaggtgggaggatggagtgagctcgggaggttgaggctgcagcgagccgagatcgtgtcactgcactccagcctgggtgatggggcaacagatcacaggcaaccctgtgacacagatctcacctgcaggttcagtgctgactggcttcacactgtcccccggctgcacttgctctaccttagacaccctttcatactttctccctctgactcccacccgtccccctatcctcactctcagccagcactgttgcttcatccttcccttgacagcagtggcgcacagactcccacaggcttgctcttggcccgcgggcggggctgtgcccacactctgcttccaacctttttccacaggtgactgtctgtgccccatcgaaggccacccttccaggtgggcatcagtcccgtgccatcacctactcagcgacaccactccagcgattctcccgtctctcccactagataattcccacctgatacaaacataatgcttgtttctcccctcttaaaagcaaaacaagaaaacaaaccaaaatacactctaggcctcacttctttacctaccaccctaggtttgcagtacggctaatttcctttttttttttttttttttttttttttttagtagagatggggtttcaccatattgcccaggctggtctcaaactctggagctcaggtgatccacccaccttagcctcccaaagtgttgagattacaaacgtgagccatgacatctggcccaaaagtaaacttttaaaacacatcctatagaatgggagaaaatacttggaaatcatatatctgataagggtctagtatctagaatatataaaggactcttaaattcaacaataaaaagacatcccatttaaaaatgggcaagtaatttgaatagacatttctccaaagaagatatgcaaatgcatgccataagtacatgagaagatgctctacatcattagtcattagagaaatacaaattaaaatcacaaggagacaccacttctcacccactgggatgaccacaacgaaaaagacaataataagtgttgacaaggatctggagaaatttgcatattgctgatgagaatgtaaaaggaacagctgctttggaaaacaatttgccagttcctcaaaaagttaaaatagatttaccatataacgcagcaatctacttctaggtgtatacttaagagtattgaacacatatgttcacataaaaacttgcacatgaatgttgatagcagcattattcataatagccaaaaagtggcaacacccaaggtccatcacctgatgcatgcataaaatgtgatgtatccgtataatggaatattattcagccataaaaaagagtggagtgctgatacatgctacaacatagatgaaccttgaaaacagtatactaagtgaaagaagccagtcacaaaaggacacatattgtatacttccatttataggaagtttccagagacagaaagttcatgtcagggaggggacagtgtgtatggggtttctttttggggtcatcaaatgttctagaattagacagtggtaagagttgtacaacctagtgaataatactaaggaccactaaattatatattttaaaaaggtaaattttggccgggcacggtggctcacgcctgtaatcccagcactttgggaggttgacacgggtggatcacctgaaatcttgggagctggagaccagcctgaccaacatggagaaatcccatctctaccaaaaatacaaaaaaattagctgggtatggtggtgcatgcctataatcccagctactcaggaggctgaggcaggataattgcttgaactcagaaggcggaggctgcagtgagccaagatcgtgccattgcactccagcctgggcaacaagagcgaaactccgtctcaaacacaaacaaacaaacaaaaaaataaaataaaatcgtaaattttatggtatgtgaattatatctcaataaaaaattattacaataaaaaagaaagaaaaaacaatgcctgaactcttgatcctgccctgaaaccttttccacctgaagcctttcccatccccatcctgatgatccgcccatcctgttgttgctcaggccaaacattttggaaccatcctgatttctcttattttttcgcacagccccttgcccctctccattatttttcaccaacctcactcactccactgcaactcctgggacacaccaggcagctctcaccccaggggctttgcccagcagctgccttctggctgaaattgtctgccaccacgtatttgtctggttttccctgcccctggctttttttgttttgttctttttttgagaccgagtctcgctctttcccccagactggagtgcaatggtgcaatatcggctcactgcaaccttcacctcctgggttcaagcgattcttctgcctcagcatcccaagtagctgggattacaggtgcacaccatcactcctggctaagtcttgtatttttagtagagatggggtttcaccatgttggccaggctggtctcgaactcctgacctcaagtgatccacccgcctaggcatcccaaagtgctggaattacaggcatgagccaccacgcccagcccctgcccctgttctgaggcgttgccctgatgtgactttcttgtgagacctactctgaccatacctcacccacaacatcttcattccccctcattccctctgctctgcttcttttccattgtacttaacactgttagctacataacttactattgatgctatacaacttatttgttttttctttgacatggtgtctcattcttttacccagctggagtacagtggtgcaatcacagctcactgcagtctcaatatcctgggctcaagcaactccttccatcttagcctcctgagtagctgagagtatgggcacatgccatcatgtcagctaattttttttttttttttttagagacgggggtctcactatgttgcccaggctggtcttgaactcctgggctcaagcaatcctcctgctttggcctcccatagcgctaggattacaggaacgatccaccatgcctggcctgtttttatgtttatttcatttcctacccccagtgtaagatccacatgggcaagggtttttttgtctgctttattcatcactgtatcccaagtgcctagggcagcatctggcatatagtattattcaataaatatttgctgaatgaatgagtgaacactaaaggatgagaaggaattaaccaggaaaagtggttagagagggcagtggaaggaaatgttcggggaggagaaacaatatgtataaatgccttaacaaactaagggagaaaaaacagcatttgctcatcaaacagatggcataaagtcatttgataaaagtcaacatgcattcacgataaagacaacctcttaacttgcttaacaaactgaacaaactcatgaacgtacttcttaacttgataaggtgttatctaccagaaacttagagcaaacaccatttgtaatggtgcagcattggaaacattgccacggtccgactgtttttctggtatctggaagggtcctactcctctaccgctttagaagttaggcttggccatggcacttgctttgaaatgctagtgaacagaatacatgttgctttagggtggaagctcccaaagcttgttcctcctgccttagtgatcctggaagtagctgaccatggaggtgcagagcctcaattagcctggatccctgagaaacaataaatggatgcctcctcagccctaagacttgtgttggacatgaaatgtgagtgagaaataaatttctattgtgttaagccactagattttgggatcgtttgttactgtaatataccttgacctatcctgaatgttacatccaatgcagtcagaaatgaatcaatgcttctactcttctacaatgtactggaagttacaactaatgcaataaaaatttaaagacaagcaagaggtttaaggattggaaaggaagaggccaaattgccatagtttctggtgatgcgatcatccacctggaaaactcaacagcaacaattggtgagcccagcgatcctcttgccttggcctcccaaagtgctgggattacaggtggtccttgagtgttttgactgctatccatcacatgaggttaagtgtggaatttttcactggtggtgtcatgtctgtgctcaaaatatttcagatttttgagcattttgggttttggattttcagattagggatgctcaacctgcacacataatctatcaattctacttctagatatttaatctaggaaaatgcttgcccagatacataagaatatatatggatatttatggcaacattgcttgcaatattaagaaatggaataaattccaaacataatatcataagtaatatcaatatgaagttaataacatgtgggatattcatatattaaattattattttcagcattttaaaacaatgaaactgaaccaaatctatgtgcatgaacatgtacagatctcaaaagcatattcctgagtaaaaaaagtcagctcctaagtgccacctacaatatgatgccatttatatttatatctatattttaaaaacttttattcttttattaatatttaggcctatgtaaacatcgtactattattattattattattttgagacagagttttgctcttgtcgcccaggctagagtgcaatggcgtgattttggctcactgcaacctctgcctccggggttcaagagattctcctgcctcagcctcccaagtagctggaattacaggctcccgccaccacgcccagctaatatttgtattatttttagtagaaacagggtttcaccatattggccaggctggtctcgaactcctgacctcaggtgatccatctgcctcggcctcccaaagtgctgggattacagacttaagccacctcacccggcctgtattattttatatatatgaaatatttcatagcaaaacaaactaaaaaggagaataaatgtaaataaaaaatatccacaccctctaaagggtgtgcagggaagtctgtatcctattctgtgcctccaggacccactaccaggtgcagttatcaatttactggggctcagtcaatcaattcttcccatttttcctgggcatattatacactgtattgaaccttgatttttttcattaaacaatatatctacccaaaggaaacctgtatgctcaatggcaacaaatccaaactgtgtcagtgaaacatacgatgtgtgttgaaaacccaggaaacagaacacagagatgacaggaaataaagctgcatctcatgccccagcacaactgcagggcatggaagcagcaggaagagcaagtgccccatgtctgtgggtgcaggaagcgaatctgtaggtccagaaatgcaggatttgtgggtttttgttttgttttgttgagacaagttcttgctttgtcgtccaggctggagtgcagtgtcgcaatctcagttcattgcagcctcgacctcctgggctcaagccatcctcccacctcagcctccacagtagctgggactatgctcagctactttttaaacttctttgtagagacgggggtcttgtgatttacccaagctggtctcatactcctgggctcaagtgatcctccccactcagcctcctaaagtggcgagatgacaggcgtgagccactgtacctggccgccattcacattttcatgtttctgatctgctggttgtactggctatcaggacagtgcagcactaatcttcatgcagctgcattgctgctgtatttgcatcctactagaacagctgcaataatttcaccatctctattttctttacaaagtacttgcctgacaccagaattttaaacagactttctgactaagtggtcttaaacattccatggccacctttcttagtgtccaggtaattcagaataggtaataggggaattgtcaaaatcaaatgaagtttaaagtgcttcatggtttttagaaaatacttcacgaaaggaaggcagaatgtttacaaatctaataattaaatttgaaggacaatctaaaaagatctacaaattcatagcttaactggcctaagaccgagtgagccatcacacactgtgggcaccacagcacgacctcaagaactcaggaggaatttccttccccatgtcacagagagctttgtgacagggactggcaggaaaccatggtcccacctagtaagattctgagatgttttccactcctttttttttttttttgagatggagtcttgctctgttgcccaggctggagtgcagtggtgcgatcttggctcactgcaacctctgcctcctgggttcaagcaattctcctgcttcagcctcctgagcagctgggattacaggtgtgcaccaccacaccctgctaatttttgtatttttagtacagacgggtttcaccatgttggtcaggctggtctcgaactcctgaccctgtgatcctcctgcctcagcctcccaaagtgctggcattacaggtgtgagccaccgcacccagccgtttttcactcttaagggatattcatttcagtagctaaagtaactgaaataatttctgggttgcttcttggtaaacaacatagacttgaaagaagcagttctctaactttttggtctcatcaacacagagcctttgtttatctgcgttatttctattgatatttagtgtattataaaagacatttaaggatatttcattatttaaaaataacaagaaatccaacatatggtaacatgaatgttttatgaaaatattttaaaagtatttggtgacaggagtagaattattttcctttttgaaaacctctttaatgctgaccttagggatagaagaccgctgtgctgtcatatctgcttctgtgttcagtctgctgtgatgagttgttctggttgaagtaggtgaagaaaatccggcctcacacagagatgtagctggaaaagggaggagtaatttaacagccacttcagacattctgggtgtgtgttttcttttgttttgtttgagacagtctcactctgttgcccaggttggagagcagtgacatgatctcggctcactgtaacctccgcctcccaggtttaagcgattctcctgcctcagcctcctgagtagctgggattacaggcatgtgccaccacgcctggctaatttttgttatttttagtagagacggggttttgccatgttgcccaggctggtcttgagctcctggcctcaagcaatccgcccgcctcagcctcctaaagtgctgggattacagacttgagccactgtgcctggctttactgaaatcctaaaaccacactattagctattattattaatctttacagatgataaaactgagactctgggaggttaagtaacttgattaagctcacacagctaggaactgggagtgctaggaatccaaccctagcagtttggctccagaacccaagtttggaccactatactgattacattaagcccctaacagaggagttctccagggagtgggggaagggacctcttggggaatagagtgggcagcggtcagttagagctttgtaacacctgtagttgttctatgcttttaaacagtaaagtatattggcatataatttctaatgttaaaattacttttaaaaaattatatatggaatagctaggtgtggtggctcaaacctgtagtcccagctacttgagaggctgaggcaagaggctgaggtgagaggctgaggcgagaggctgaagcgggaggctgaggtgagaggctgaggtgggaggctgaggcaagaggctgaagtgggatgctgaggcgagaggctaaggcaggaggctgaggcaagaggctgaagcgggaggctgaggcgagaggctgaggtgggaggatctctgaagtttgcattcagcttgggcaatgtcgcaagcccttgttttcttgttttctttttttttttttttttttgagatagaatctcgctctgtcacccagactggagtgcagtggtgcaatctcggctcactggaacctctgcttcctgggttcaagtgattctcctgcctcagcctccccagtagctgggattacaggtgcgcaacaccatgcctggctaatttttgtatttttagtagagacaggatttcgccatgttggccaggctggtcttgaactcctgacctcaagtgatccacccgcctcagcctcccaaagtactgggtttacaggcatgagccacagcgcccagcctgtaaaaccttgttttctttaaaaaaaaaattattgaatatagttttgggattatgtacttatttttcataatatagtgaggagagctgtaagggagtagacggagttccctaagtctctagtggtggaccagacccaacgtgatgcagaggagtgtttgggaggctttcctgaggaagcaccttttagctgagttacagatgatgtgtgtctgttagtcaacagagttgagggattgggtgtgggagggggaagggatttccgggcagaggaaacagtgtgagcaaaggtcctgaggggcactacagattccagaaactgagaaaaagacaagtgtgttggcccttagagaaagaggcggcatggcaagagacagggctgcaaaggaggacagggatcagacttcatgggatcttccaggctgaggaaaggactgggagcatattctaagagccacacgtgctgctgagtaagatgaaaatggaaaatgctgatcggcaccagggaggtccctagagtcactttagcaggggctgcgttacagtagtgagtggaactgccaagaaagagactgaaagtgtacacatctctttcaaaacatgttgctctaaagcacaagaccgggatagaaaggcacctggaggaagaatgggtttgattttttttgctgccattcctatttctgtgatgggaaaaacctcttcacacagagtcatatccacaaggatgtttatcacagtattatttattaaaacaacaccaaaaaaagaggacctacatatccaacaatagaccctttaatcaaattatgggatatccaaatgatgcaatacaactcaagacttaaaaatcatattgtagcagaagggaaatacaactccgtatgtatgagacagagttttgctcttcttgtccaggctggagtgcagtggtgtgatgtcagctcactgcaacctccgcctcccaggttcaagcaattctcctgcctcagcctcctgagtagctgggattacaggcacccgccaccatgcccggctaatttttctttctttcttttctttttttttttttagtagagatggggtctcaccatgttggccaggctggtcttgaactcctgacctcaggtgatccacccacctcggcctctcaaagtgctgggattacaggcatgagccaccacacctggccagtgtatcatatgttaagtttaggaagcaagttataaaataacaaatgtattacgatcccattttggtatggggagttgagtatatgtgacagggtgtctccttcatctgttcctttcttccctgtcttcatccttggtggtgatggtggtagtggggtctttggatataatgcaccataataaaaattatgccaagagatgtgatccactttatcaaaaaggaaatgtatttgttttgtaggtgctccacgtggggacacacgagggtccaccacaatctcccaggagggagctgggtcctgggaggagggcagagggatcagagagagggagaccagggggaggagtttctggccccaattttgtaccaaagctggaaaaaacaaagtgttgctcattctttggattttggaaaatttgtgatagattataagacagattttttgggggggtattgaagaaaggtgtaaccactcattatctgaaaccacaggctgaatttactgcatgcttaagcaagggacagctgtacttgcaaggcacagcgtatctctgagcaaagcagagaattaatcccatacaggttttgggaagtgtgtggtttaaggatgggtcaacgtgtgctggttgatctttggcacagtcattggcatgcagctgttgccgactggttattttcagaagcgtggggctagtcctgattgagtgcatagtttcagcagcacagttactgaaacacatggccatataaaccaggtttataattggttctaagagtcacttgatatcatagccacataccaattagtcttttcctaagagggtgggcatgttttattctagggggaagaaggggaagggcagatagctctatatacacacaaagaggaaggtctcagtagagcagcctgtgtgtcttctccgctgctggagctcatcttgactggccagggctggttcctaagaaggatcccaggcacccagagcctcctgggtttggatgtgagaggaaagtcctgtgacctcctttgcctctcccatgtctggagagaagctgtatttccggctaatccaggagcgacagctccagggtgcaccccaggttctgacatggggacttgcagcacccccccaggttggaccctgacgtgcctggcaccccttgtgaacccaagacctcaacttcagcttctccgcacagcagccatggccagctgtcagccgccacctcctccgagaggctggaattcctcgggcagatttctcaccctcgcaggacttctttccagcgtgtctggcaagtgagagggcttcgcaggccccaggagaggcttgtggcagagagggctttgaaagggagaggaggagggagggtactgctgttacagcccaagccttaggcccccgctgaggacgtcaggtggcccatgtctggaaacacccagcgctgtggcccacgtggtgactcttgggtggcccaggctgggtgtgtgggggcagggcctcagagaagagagaaggagaaggggaagaccgagggctgggggtggcggtggagaggccactgaggacagggagtggaacaaccttgcagagagtggtgcagggagaagttactagaatggcagcaccctctcccgccacccaggcgacacctctcggggaacccacctctgcgagggagccctcaacttcctcccggcctgacctgcctgctcgagggtttccacggtcacaaagttacctcagggactagaaaagaaccatctttttggcctggagcctctgaggtggggcctcctcggcctcagtcacagccaaggtcagggggaaggagagcgccccaggcttccctcaggaaaaggaagggtccggcttctttagggaaacagctgctgggatctggtgctgacagacggccatctttccacaccaaggctctggcctgtcaccaccctgtctggggcctcgagttcccaccagagttttcataggggcctcttctgctgacccacccaatccacccgcagatggtctggcccgcctctcagactgggagcggacccagctcacttccctaccgccccactgcccttctctctctccatcctcaagaggaggtgaggtggtgaggggcagtgagcacaggcttcggattcaattccacgtcagtcacttatggtacagttttaaattctgactcgcttaacttacatggctttggaccagcctgggcctcagctccttcatttgtaagatgaggaggtggaaatggattatttgtaaactttctttcagccctaaattccatgatcatatcatattattgtttaatttctaattttttttttttagagacagggtctcactctgttgcccaggctggagtgcagtgacatcatagctttctgcagcctcaaactcctgggatcaagcaatcctcctgcctcagtctcccaagtagctgggactacaggtgtgcaccaccatacctggctaatttttttttttaattttaatttaagatggcatctcaccctgtcacccaagccggagtgtagtggcgcgatctcagctcagtgcaacctgcacctcccaggctcaagagattctccagcctcagcctcctgagtagctggggcttgtagccccatgcccagcaaatttttgtatttcttgtagagatgggatttcaccatgttgcccaggccagtctcaaacacctgggctcaagtgattcacctgcctcggcctcccaaagtggtgggattacggcgtgagccaccatgctcggccataatttaaaatttttttgtaaagacctcaattcattgccaaagcaatcctctcgctttggcctcccaaagtgttgagattacaggcgtgagccactgtgcccggccacgttattgtttaaaaaacatgcctcttgcagcctagcacagccctaactccccagcatggcacccggggcccagcccgcctaccagccttagccatcaccctctgattcacctgccttaagcatcagccaaactgaaccgctggagagtccctgtacaggtaggggttttgccagctctggggtctttgttaatgggttgcctccacctagaatggcttccccagtcatctccccagacccaaatcttgcctactcttcaagtcacagctcaaatgccaccagctttgcaaagccagttctgatgttccccagctgcaggtcatctcaggtggctttagcagctcttcagctgcattcttttagctacatggcctgctttccttctattctaatcacctgtgtatatctgattccgctgacgaactttttaaggtcagcgacaatgtcttatttctctctgcgtaaccctagctaatcgaggtgctcccctgggttcagtctctgcctagtgtctcactgagtgggcgtctctcaaagaacattcgggcctgcaatgttagggagcatgacagtgcttcctcaaagcccttctcaaactgtcttatatcaatagagactccacagcaaaaccccaaactccttctctagtcccagccccgaggccttttatttccctctgcctacctgcttgctttctctttcctagctgttaggtagaccagcttagccctccagctgtgatctctctccttattccccttatttattgcagaatagaattttctttagtaggtagggaagacttttgcttgctaatatactttgccctgtcatacatgtatctactacaaaatacctaggccttgtagactcaaaaaatgctcatgagtgaataaatgatcagggttaccagcccacgtgcatgattaagaccaaacaatctacttctctctatccttgttacttctccctagaccaaaccaccataattggttgcctggcttctccacagcctttgaagtggtatttgtactctaagttttacactcctagagaccattttccacatagtgggtggagtgattgttcaaaaatgtacctaatggctgggtgtggtggctcacgcctgtaatcctaacactttgggaggctgaggtgggtggatcacttgaggtcaggagtttgagaccagcctggccaacatggcaaaaccctgtctctaataaaaacacaaaaattagccaggtgtggtggtgtgcacctgtagtcctagctactcaggaggctgaggcatgagaatcgcttgaacccggcaggtggaggctgcagtgagcggagattgtgccactgcactctagcatgggtgacagagtgaaaccctgtctcaaaaagaaaaaaatgtatctaatgtcatttcattcccctgtttgaaactctgcagtggtttatctcacattataacaaaatttgaactccttaccctgacttgcaaagccctttatggtctggcccctggctacttccaacatcacatcccatatcccccctccctgcccatcatgctccagccacactggggttccttccagcactttccaccagctgtgccctctggagtgctcttatccctgatctttacatgaccaactccttcttgtccttcaaactttaccatcaatgtcatctccacagagatgccatccataacctcctgacctagagtaccttccccccaacgctatctcttcacctttccttattttctgttctggtttcttattgctgcataacaaactacctcaaaacaatttgttattatagtattttatgtttctgtgcatcaaggaaatcaaacggcacagtggatacagcttgtctttgctctgtaagatctggggcatctgctaagataactgtaatggctgcgggttggaatagcttggggttggctgagtctctctctctctctctttttccacatctctatacggccagcttgagcttccttccaacatggtgacctcagggtagttggacatcttacatgatagcatagggttccaacagaccaaggcagaagctgccagtcctcttgaaagctagacttgaaacaagtatagggtctcttctgctatagtctactgatcaacgcagacccaggccaattcagattcaaacagagggaagacacttcacctcttaagaggaggaatgtaaaataattcaagagcatctctaatatgagagaacgcattttggcagcaagacattttcttattaatgtatttgtttatatgggtaacttgcttattgagcaagtttttttcccccttccatcattgcttctagatgaactatgttggttctcctttttctgtcccgtaacagtatcttgggcagatcttctagtattcctgttgctttagcttattaaaggcccagccccatctaggctggtccatctaaccaagactaaccatttcccttccccaggcagggtctggatttggcccaggggagtggggaggggtgtagtttgcccctgtacccccactcctctctctctctcctcctccttttctctccccttttctcttctttcacacagatggggagggagagctttcaggaaagtccctgtcagctgtggccatttcttctctggctatgaatgttcccggcatgatggcgttcagatgctaactctcttgtgggttcaccacagggccacctcgcaccactgttccctgatgtgagaggtcccttcagctctatatctctcaccccaccactcagccactgccccaacctccacccaacagcctaccgactgtgggtctgcacagctgcaggcctccctcttgggaggacatggacaagacagctcaaggacatgcaccttccgccatgtccacctgacccatgggcaacgactgctgggtgccccaaggagtccctgccctgtctgtctctgcctcttcaatcctgccctcccccaacctccctgtccagatggcgcgtgggctgatctcaacagcaaatccagatccagggagaggaggggagggagtcagcaccccaggactccagtgacccatctccctctctcttccttcccctgtcctggtcttctgcttatggagactgaggaagggggtgctgggagatttgggggcatagcagaattgctttaaccatctcttaataaatcctgtaggcaaatgggcctagtctcaaatggttcctttgttttagaatatggggtactcaaggccctttttccttagctctgagtccggccacccattcgagcagcagaaaaggcccacccagtaccctctggcactagagcatgggctgtctctcccctcgcatgtgtggtccacgagagcagggtcctgtgtgtctgtccccactggatcctggatgcctagtcagtgtctaggacacagagggtgctccacaaatagatgacaagcaaatccctctaggacctaaatggctggaacggctgccaatatagtcaagtaggccagctggctccttcctacccattcctgctgcgaggctcctgcccacggatgtggagttttgcttctggcttccaggagcttttctggtttctgtcttgctctctacaggggtcactggcctgggtcgggaggctgcccgccatgtgggtgaccttatggagccaaaagccttgaagatgctaccgggcctgggttggggtcctcagggctgagctagaggcctggccagtgggaggggatgggtgctcttcccagttcacagtgggtcaaaggcaacagctcagaacagctgcagctaaagagaggagaggcaggagaggaagtgcatttctttggcaaagtatgtctcctggggctgactcacacccgtctatgaccacagccagaagcacattctgaccagcgtgtcctgcagagtccccaggcctcggtgaacagggcaccaaggacagctgcctcagcagggccaccccactccgctggacatccccagctcccctcaaagccccaggcaggcccctgtgcccctgggtccctgtgggtttctcctcagcagcctcaaatgaggaagtgaggctgaggagagaatgggggaacttctcttcccccaatacatatagcagcatataacatcaaagacacagacacacagacacacacacacacacacacacacacacacacacacacacacaccccttgcaggtcagaagcagagtggagtttgatagtaagtggtttggattaaaaaaaaaataggcctggcatggtggctcatgcctgtcatcccagcactttgggaggctgaggcgggtggatcacttgaggtcaggagttcaagaccagcttggtcaacatggtgaaaccctgtctctactaaaaatacaaaaattagccgggcatggtggcgcacgcctgtaatcccagctactcagaaggctgaggcaggagaatcgcttgaacctgggaggtggaggttgcagtgagccgagattgtggcactgcactccagcctgggcgacagaaggagactccgtctcaaaaaaaaaaccattaaaaaataataagaagatttatttttttcctgccaaagcactgaggaggaagacggaaggaactggggggtaaaaggcagagaaatccgggcagcatctgctggtccttgcgtctgttcagcagcccgagcaggctatacgtgctgccgttcagcgccctgagacccagcccaggatgtctatcaggagggccggaggagttcgggagtccttgcggcactgggctggggcagccctaagccctgggagaggaggagattgtgctcttgatgctgttaaaaagtggctgggaccagcctctcctcaactttggaaacaaaactacatcttgggagctcctcgttagggaaggggcgaccccagggtgctgtagaagcaggttgggcgacctccggggcagccttgaagtggcctccacaggaacagtctccagtgaccacccagggccaccgagacttgagcctgggccccagtagaaatgtgtcaaagccagaagagccatctagccaggcccctcaggtcagagatgaaacgtgaaggcagagggaagcccagtgccactcggtgagttatagacaaagccaggcctctgacccccgcttcagtgctcttaactctccatcagccatttcaccttcttgggcctaagtgtcctcagctgtcaaaaggaggaaggaaggagcaagctaacatgttgtcgtgagctgtgacatgccctctcgtcgactgagcgaggcttttgagataaggaaactgaggctcggagaaggtgctgtgctcttcctgttacaccccgatccctgggtctgtctggcttccgttcccggctgacgctcactgccccggaagacacacccactagatcagcgtttccacactagaatactttattcaagagaatctggcttggcagtcagatggccctgcagggacagcttgtgggggtgccagggcccttggggaacctgctcccctgccactgccttcagctgggacgcacaggctcctcccctggtgacctcatccccactggctgagctgtttctcatccaggcagctctttctccagcccggggcccactctgtatgtgtctcttagggggggcagggtggtggcaccttggccggaaagaacaatgtcccagtacaagcaaatggcaaagtgtgaggggagatcacgggggacaaggagtggcaaaagcccccaggcaaccactgttctccagagctgaatgttctgatcttcagaagaagagggggaagtggctggatcccctccgcccgctgccggccttcccaccagccaggccgtggcggccccagcaggatccgcatccctactttggacaggagctccgaaagcaagggctgcttgtctgtgcagagcctgaggcccaagaacaggtagcagggcccccttctttccttctgcaggcccctggagacctccagggcctctggggcctagcttgcccctcacgaggccacgtgtcttgcttctttcaaagcggaagctcccaggggtctgtggctggcttctctctttctctcacgttgttgaaggcactgaattcctgagggtcctgtccttccctgcccctcgtcttgaagggagcgaggcattcagcagggaaacagttggctaataaatagagggcaggtaccagcaggagtcactgaagagtgtgacggtaataaatacacgagccgggtgcggggtctctctcctccaaggggtgggttacctccggggaacagcatcgccgcacctgccagagaccaagcacagacggggcgggtatcagcacactgtggagggtgcggtctcctcctatggaggagggggcaggcccagaggaggagcttgggcagggagcatggggagggcgcagtgctcctgggtccctgcttgcttcaagctgaggagaagctgggagctacccttcaccaaacacttacccatgtgcccagccctgtgccaagcactgtcttcttaaccctcaacaaccttccatgaggaaggcaccctgattattcttgtgaagattaggaaactgaggcccagagaggtgaagaagcttgcctgtggtcacacggccagtcggtgacagagccacatttgaacctaatcacactccatgcaatcatgcctctgattaccctaagacagcagtctccaaacaggggagtaccgctagacgcacgtgaggcctgagtactgacggttttaaagaaatccattttcagcctccaggtctacattgccttaaaattatttttgtgaggcagtggctgagatctgcttctctggccacaacacatcttgctcattctaaatcctcataaagtgctttgctgccaggtaaaagtattctgaggacatgaaaaaaagaacaatttgagatattgatgtaggtcttgagaaagaaaatatggctaatgactgggtaaccaaggctttcaacaaaactgaagaacagcttaaccaaattgtcagccaggatatcatgagaagtaatttgttcttagcagagcaccttgagatttctggcaaataacttggaaggaaggagttcaagtaattgagtgacatctagtctcatttacttatttatgtgaacatggtttctcaaccttctcatcaataaaaaaatgataaacaggaattaaattaatgcagaatcctgtctcagtctggcaggaagtaacattcattaatggattcattcactaattgaaacgaggtagccacatccatctcattgagatgcattcccaatcaaattgattgtatttttatgttgaacatctattaaaataggaagtatttgtgctgttttgaccaaatggtgctactaagaattattttgataatttattccaggagaaaatttaatttaggtttatgctcacaggaaatttaaaataattcaaactcatatatcatttttttgtggcagataaatatgacaaggtaatcaataaaagacttctgaaaattaaaagtactgttacactaggctgaaattcttgggggtggggagtgaaatggaaatacaagttccaggaaaaaagaaacaatgtaaatatataattatgaaaggaagtgttcctgtattttttttttttttgcttgttaattttctttttttttttttgagacggagtcttgctctgtcccaggctggagtgcagtggcgtgatctcggctcactgcaagttccgcctcccgggttcatgccattctcctgcctcagcctcccgagtagctgggactataggcacccaccaccacacccggctaattttttgtatttttagtacagatggggtttcaccatgttagccaggatggtctcgatctcctaaccttgcgatccgcccgccttggcctccaaaagtgctgggattacaggtgtgagccaccgcgcctggcctgcttgttcattttcttaaaagtggatgatggtgagtataacattaaaatggcgtatttaataggatacacctggagagtgttctacaatagctttgtattaaaatattaataatatgccagaaattatatcctttgtaatgacttatacttttttttttttgagacaggttcttactctgtcacccaggctgaggtgcagtggatctatctcggctcactgcagccttgacctcccaggctcaggtgatcattccacctcagcctcctgagtagttgggactataggcacatggcaccacgtccagctagtttttgtattttttttgtagagacgaggtttcaccatgttgccccggctaggcttgaactcctggcctcaagcgatccactcgcctcggcctcccaaagtgctagaattacaggcatgaggtactgagcctggcttgacttataattctgatgaaaatgttcaatgtcaacttaagaatgggcaagggagcacatgggcttttggaattctttttttttttttttttgagacggagtcttgctctgtcacccaggctggagtgcagtggcgtgatctcggctcactgcaacctccgcctcccgggttcaagcgattctcctgcctcagcctcccaagtagctgagattacaggcatgcaccaacacgcccagctaattttgtatttttagtagagatgtggtttcaccgtgttggtcaggctggcctcgaacttctgacctcaagtgatctacccacttcggcctcccaaagtgctgggattacaggtgttagccactgcgcccggccacttttgaaattctttcaggagattcccgagtgaaatgtctgaagactgctgccttgggaacaggagccacgggacactttctgcctccggctgccggcgggtaactcgggcctggatggacttccctgccagcttgtttcccaaattgccgcgcgggcccagaaaagagatgagagcataaacccctagggggcgcagtccccaggatccctgtcttcatggagtggggctcatggggtcagggcttgggtcaactccactccatagcacgaaatgacttcctggagtcacgtgcgtgggggaggcttagcccctgaaggagagccacctctcttcagtgactgattgactgtgcacgtgaaatattttattttttctatttactctcacagatttgggttttccctcctctcatccttctctcccagccacactcaggcctggggctccattctgctgcccacaaggtacgaagtgggttagaagcagcaaggggacccacaggcaaaaatactcctgggagacagtggcgaggggcacatgttccccggggctactaggaagtggccccagataacgtctcagctgatgacagacttttaatcactaaaaggtaaacactaatgtgcaggaatcctgtttgtttgctcacagatgtacctgacacacagtaagtgctcagtaaatgtttgtagagtgactgaatgtttgctggacctcctgcccctcattctacacagagaaaagctaggctgacaaaggtgaaatgatttgttgaaggtcaatggaaacctagggctaagccgggacaaaaaccaaggtccactgatgcttcctgggccctagagtcttgaggaggtgcagctccctgttctgcccccaagactggcctcagtcctgcctctccccctccccaacctaaccctggcggcaaggcggggctcccctcgggcccagcctcctcgccatccctgggaccccgcacactcacaggtggcagtctgtgggtctctgcttctctctcctcctcttccccctgcccttgggtctcctcctgcaataagccaagcgtcaggacaaggtggctggggaaccccatgctaggacagaggctggcaggcccgagaatagccccgagccccagccaaaccacttacctttccggcttcatcttctcccgcagaggcctagggaaacagacagagagaggggcagaggaacgttaggaaagcaataagtggggctccctgccgcccggacaggtcccctccgacatccccagtcctggtcctgcagctgacactgaggccactagggggtagcatggagttggcaagggagaggtggccagagcctcaaggcttcactcccactccaggctctggtgaccccaccacgagagggacaaatcaacctcctggggacccctgccacccgcttctgcacttctcagcctcttggcatcaaatttggttgtttctgtctgttctctgttgctttttctttctcactttctttgctgcttttttccgttccttccagggtgcattctgggaatttcctcagggacaggagatgatggccagacagcggactggctgcctgtcagggcacagccccactccatccggaacaacatggggagtgagcgacggggtgggaggaaggagggagcatcagccctgaagtcaccaggcatgtctgggctctgcctcccagggctgtggctgttggcccagaagcaagaagaaaggtgtccctgttgcctggcccctggcaggggatagggcctcagtcttcactgggaacagtgggtagagacatgggacagcatggtagcagtcagctttggggccaggacatgctaccctcagctggttcctcccttgggagccagggcaaggtaccagggcctcttgggactgtctggttgtacctctccatattgggcaagtgacagacactcttggaacctcagtctcttcatctgcctgccccaaaagagtggctgtcagggcaaaggggatggagaaggtgactctgggtcaccacccagcattgcacccaggagggttcattaccgagctcttgttatatggctaagctctggcttggagggatgggtggaaacaagttgaggcagggtctccaacactccaacaaaaggggcagccatagccctgcccaggaggcaaggctaagcctgggggctattagaaaagtggtcatggccatgaaaggtagcctgaaaaacgaaggcttacgagttaggtcagggcccagaatccctcctcccacactcactagctgtgataaatcatgaaactgtattgagccttgattttctcatctgtaaaatggggatgacaatagggcctacctcccagggttgttatgagagcaggaaccttgctcaccactgcatcccatcaggacaatgcctggcatgtggtaggtgctcaataaatgtatgtgactaaatgagaaacattcaagtgcctcctgcggggctaggcacagaataggtacacaataagtggtagtcttccctcctgccgcccctggctagggctctggacttctagtctggtgccttcatccatggcccagtagtaccaggagcagcagctcagcccatttctctcttccctgaacctagctggcagtgccaggcctgttgctcctgctaaccaatgttccaagtgcccccagcacaggcagcaagactggtgctggtcagaggctctgtggattgggaggggccgtagaggggtgctgcaacatcaaggaagccacagtgtcactcttcttctgccccttttctcctacccgagcttgtccttcttgctgcttctcagccccgtttgcccgctcctgtgggcacacagcttgccccagaacgaagttcagacttgcaatgtctttgcctccaggcacctctttcagaggcccgtggcagctgcctcccatcccagagaaggggaacgacacgcaccgaacccctgcgaggctgggagggacccaccctctctcttcccttgcagtatctcaacagctgtaccccagctgctgggaccagctcccttggcaaaactggctggtggggggacaaaatgaatggtagccacccctggtcctgccctcttggtctccctcagtctggaaaaaagttcagcccgcagcggggatgggcagcctttgcctctgccctgggacccatctttgctgaggctgccaagaggacgggggcctttccttgctacccacccgaccccggagacctaccggcattcgcagcgaacgtgctgagagaacgtcagctccacgtaggagggccggtccccagaacggatctttaggagctgaaggaagaaagagttgatgcctggattggggagtggcccacgagtttccggcactcttctctctctccttgtaaggagaacccgactctgtttcctgctagcctgtggactacaggccctcactccactctgaacgtggggcaaacagctctctcagctgcatggggatctgagggaggcccctgtccctccctgcccgggagcactagcacagcaatagcacaggaagggggctcatgttctggagtcagagagacccgtgttcagatcttgactcttttacctgctgaacaagtgaaataacatctctgaaccttgagttccccatccgtgaaatgggaatgacaccagccttgaaggattgaatgacacaccacttgtggcacgcctaggacagtgcttggcattactcagtaagtgctcagtaaaccactgcgtgtgtgacatgtaagctgcacttgcttgaaaagggaccaaatgctcctggtgtcaacagggactttatacaagcagatttctttccagctttaactagacaccctgagtcttgggataggactcagcgtgaggctgagaatgctggtgggggtggagatgagtgggctcagagccatcggagggcttaggaagaagaggccctgggctggggtggtaggagcactggcctgggagtcaggctccagccctgggacctgggcctatcttcttccctctccaggtaccttctagtgggcagattcggtggccccctgggcagggtatggacctacctgcatggtgacattggccgtctccaccggcacacagtgcagattctcatcgccgcagcagccggtgcagcgcagcagggagacacaggatgggctgaacatgtgctccacctcgctggggtactcggacacgacgtccaccagcctctccagcgcccggcagtagctgcggccccacacttcctggaagggtaccactgcgaggaagcaagggggctgggtcaggccagcagagacctgccccttgaagccctaaacctggctcccaaggccctgctggccttccaggttcagcccccagccccatccgagctccctcaactctgaactcctaatgtgatccctccgaaatgcctgcgggccccttagctcatctgctggatggaaatccccatggaacagaatctctcagggtcccaagctttgctctgtcctcaactcaggcacccacgtctgccttggctccctggagctttgaggattgtagccccggcagctacccaggccctctggatctttctcaagcctgacccggtgcttcctccaacttggagaacttgcagaaaacagtcattcctggagtcatgcagggagggttggccttcccttattcctctgctcaaacaccttccacggctccctcatttcctgccccactctgtgccagctcctctgcctggcaaccaagaccacatccagcaatgtggcccgaccctcctctccactgagtccaaccagcgctcacactgagccacggcagcaccacattcactcccagctctggcttgtgcactctgcagcccgtacagctgctcttcttccccctcctctcatttctatccaaataaagtccacccgccattttccacgacctgcctccccacctcctctttgaagacttccccagcaattccagtgcacacagatgagcctcccttgagcactgcttggcctctggcctcaaggggttgccttatctccggcactgcttgctcttatctcctttacaaccaactcgaggctccatgagggcagagatggacgtacccgtaaacacaggctaagtcactcctggttgattagatgacatttcactgaggatcatccgggtcatccctgacctcacgatgtcctggcgatcgtgaatgggatcttttgggggctgatctggaatccctcaaaagatgctgctctttcgggggaaggcctaggaccaggccccaaatagaggctcacagggagagtggccagagtcagacacctggcttccagtcctggccctacactggctatgtgaccttggggagatcacttaacctttctggatagatcagtttcctcaggtgggaaaaaagaaggttgggaataaatggttgctaaggtctttccctctctgaccaaccgcctgtgaatcagtgcctgcaacccagcccagcccagagaccatggacagagaaacacccccaggcctgggtcatcctgctctgcatctgatggtcatcctcagctagtggggaagaatggggagctgggggtcctgcagcctctgccatggaacaatggcctctcccagcaacccctcatttcttccatgcctctgcctaggaggcagaaggggccaaagtccattccactgagcctatgaggacatgagcctcctggtaatctcggaagaaaaataaacttcagtcctagcagaggccctcgggaaaggctgcaaactggtggaaaatacccagaggcggtgtgtccatgtggagctggctaggcagtcatagaggcaataaacagtgttatctgcttgtttgctgctccattctgctccattctgccgtgctctgcttagagggcactagggcctaggggctggtggtggggggaatccataggcctcctctgactctaccactccgcgccactggatactgccccggaacccagtgggaaacaaggcctctctccccaaaggcgcccaaagtgcagggaagcctgcctttgcaatcctgggtcagagagcacctccctatcaccagctccttgagctgtgtgtttagtttaaaatcttcatgagcactacgtgactctgaacgtttaatctccaccttggaaaacataaataacagcagaggaataatgagctgccaaagcaccacagaagactcaggttcctgccctgggaccagccgtcagcgaggggacagcagcagagaaggggcaccccagccccctccatcctgcaaacagacacccacccagctgggctgcggggccatggccacctttggcagaactggctgggcctcggcagcagaagaagggatttcctttcctcaccccacatcccaccatgcaggttccgggtccctgaaaccctggaatctgccactttcccagccctgtggccgaactgtgttgggggagggctgagaaggaggtgggctggagcctggtttacctggcagccaccaggaaagggcaattcatccctgaaggccccgctatgggtgtgtgggagaaacaaaaggggctgggtgaggggccgggctgagggagtacagtgaccgctcccagatgtgggctgtgtccctcaggaaagagctctgctcagctgtccccgagagcacttccgctggccccagacctgctccgggagggggtggaggtgagagcaacgggaagctgtggccccctcagggccccctcaggcactgccagggctgggtggtccccagggctgctcctgaggctgcaagtgtgccctcagctctctcgccagccctgtgagtgagcctcccacctgcctacctaccacctgggatgggggagaccccaggagagaaatgcttaatcctgagagcaagtttctgtggagggcactggagacgggccacagggctgggcagagccactggccaccagcccaagcccacaagtgtcctctccatggtcactggcagggcacacagacagcctgccacaagggacaccctgctcatgcccgctcagccacggagctattgggagcacttggttctgccagatccatgaggagtgtctgaggcttggggcgacccccagggcctctctgagcctcagggcctgcctgcatctgtaaaaatggagtacaaccccttcctacttcacagcctgtggtcaaaacagaatgacagaaaatgcctaacattgttaccgtgaatagtaatagtaaaaatcaatgcccatggctggccatgctgtctctggctgtggtgttaacaggtggggatgccattttcagattttgagagctggggtgcaaagctcgttgtacttctcccggtcagattgcagactccctgattgataagtgtgacaggagagctgacctaatgaatctacacttccaggcctccccacctcaaatcctgggtgatatgtacacccatttctcctccctggagtcagaggacaagtccctttttcaatctcggaaaaagaagaaaccatagacatcatgtagccaaggctcccattttacagatgagaaaactgaggctaaggcatctttggtagctgtggcctgacctacactaaaagcaccaaaaagggcatagtgtggaggtaggggatgggtccttccccaaatcccaaggagcataatgttgtgctggttccagaggcacagcaagggaggcatccatgaggtcaagggcagctacctcctctacctgctcaggggtctaggggcctaagccttaggtgtcagagtatggccaggcccgggagaggcgggctgccaggcaggcagcccagcagagggtgttcccagcacgcagatggctatcacgcgtgtgcgtgtgcatgtccctacatgcccactctcccatggcgcaggggaaacctcagcggtggtgtgtggccactttgcacgtcttggagaggcagggagggaggagcgaggtagggggcctggcatgggcctcctgccttctgtacatatgtctctttggcaaacgtctcgttgccctttgaagactccctcttgatgcaaccagggcggggagtggaggggccagggagggcgcgactatgttctgtctgtttataatcaatggaaacgcatggtcagatcccggcagttccaccagggctgggctgctggggagggcccctcacccattcctgatcctcttgactgcccactgcattcagctcccagacccccattctggcccctggcactcactccccaccctgtcctccaagaccccatccatacccttaaatcatgctggggaagggctctgagccagctggatgaaccctggctatactggccccagccccactctccgtgtgctggtgactccagcccacacctctctagtctctgggtcaccatgaggggatctcttaggccctgccaaagtcatcacccagcatgtctagcttgtaggctctccccagcttttatcaacctgcacccacgcttcatgccacacctgggcttgggagaaaggaagagaggggcttggggagcatgcgtacccccagcctggccagcttaccttccacctctgacgagccgttcccagcagacaaggcccactgctatggacagaaaagtgcagaggtgagctgggggtaccttggagctctgcactcttgggccaagtgtgatggcaagaaggtaggggcccctctgggttccttcccacttgctgcacatgctctgccctgtctcagagcagcctgagtaccactaaaaactcactggaccctgggtaggttaggtcccacccctctctggcctcagttttcctcatttggaaaaggatgggaggctagaagcttttggagacccttggcctgctgcatcccaaagatcttccaatcctgcgggtctgccttctacccagcccccaggccaaccctgctgggccctgcacagcccgccttggctgggtgccagagcccagggggaggtgatcagctggtgggagctgaggggctggagcgggtggcgccatgagctggtgcagccggtaacgttacacctctggccagccctgcagcaggcaggcgggtggctgggctgctcggactcctcagggactgcccagcccactcctactcttgggctggggctggggactcccagggcagtgggacaacgcagtgggaaggcagttcattggctttgtcaggatttcactgcccaagctggctcccagccagactcacccggctcctgggaaaagggccctgctcacttccccaggccctgcactcaggacctccggccacccacccaggagaaaaggcacagcgagaccccttgtctcgtccccagcccacccaggagcccacggctcagtcctgagccctggtgggggcagggccagcctccccaccaacagcttcttcagctggctcctccgccacccccaccaggccaggtcagaggtcctggggacgcctggttggccatggggcctcgaccctgaccacaaggccagggacccgcctgggattagtggacagatgcttttagcaaagccaccagggctccaggggccagacaggaaacctccctccctccctccctccctgtggcttccctgcccccaccaagacagcccccaggacctgggggacagccagcctgaggtctcttcccaaacgaaagaagtccagcctggcctttaggaagtgtgtggacatccttggagttgctgctccctggagtgggtctgtgatttcagagtcccatgcttccagtgctgggatggggaggtctggggagccaggctaggtgggggtagctcttacctgggggggcacagcaggcagcgccagcccggccaggagctgcaggaagcaagggaacagcctcatgaccggcatcttctcagacgtcccgagccagggggctccgagggaaaaccaccatgctcatcccccggggagcccctggcacaggaggagaagagctgagtggggggctggacgcctccctcactgctgccccgaggccccggccggtggttcgagcatcttctggaagccttgcggagtcaggagcccgtaggtaaggctgtggctggggaacccgacggggagcggcccggcggggcggggcgccgaggggcaggcgggtcccggggatggtccgtcgggcgcccagtgccactccaggtcctcccgtagctgggcggccgtccgtcgatgcagtttcctccgcagacagcagctcccttctgagactgcagccggtccgcgcctgggtttcagggactgagccggggcggggctccgggccggccccgcccaccgcagacgaggttcccgagccgagttcccggagcgcccggtcagcccgcagcgcccggccagcccgcagcgccggagcccgcagtgcgtgcgaggggctctcggcaggtccagacgcctcgccgagcccagcccgcagctccccgggccgcgccgcgcccgcccacagggcccacagccctgcttcggctctcagggcggtcacctgggatgggggcatccaggagtccagcgtcagccgtcaaggctcatgatctaaccgcctctgcaggaagggccgtccgggatgcctgggaaggcagccatgcccacacccctagggggccaagggattcctagccaggttatatagatgaagaaaccgaggctccgagagcacccctgcctgcatatgtcgaatggacataggcattcttggaaagtgtgtgtgtgttgtgtgtgtgcgcgcatctgtgtgtccgaggaactggcagagacaaaacccaagcctacgtgactccagaactctaacccgacctaccaccctcctagccaggcacggacacagtgggcctcccacaggaaacctctcagggcacctggctggaggatcaggcctgttgcctccttgggaagcagtcttcccaggccctccctgcggggcagccccctgtggtagagagtggtctcactcaggcatctcctcctggtccctggccgaggaggaactgtacgctgcgcgggggtctgtgtgcatctgcgcgtgtgcatgggcatttgcgggtctgtgaatatccatgagcggtgcatctgagcctctgtgtggtctgagtacgtgtgactactgtacctccaaatacgcctctgtgtgggggtcaggtctctctgtatctctgtatgcttgtgtgatctgttcgtgtccgctgtgtatctgggtgtgtttggaagtgtctgaatgtgtatctttcggtgggactgtgagtctgcacgcctgcctgtctctgcgtgtgtgtgtctgtctctgtgggtgaagactgtgcctctctctctgcgtttgtgtgtgccctcccttggttctggatctttctttaccaccactcctctcactgccttctgtgtccagctcccaggctgcaggaacctggcaggactgggagtcacgagttggctgggcctggggctggtgggtggctgtgggggaggagcgaggcctgggaagtggcccctacagctcacattccagccaagagcagggaggccagggcagccccagctctcaccccagtgacctctgcgtccactgcctgcctgcctgcccacccacgaggggctgccagagatgcagcctgcctgcctggccggccctaagcctggaggttcaggaggcgggggccagtcaccagctggctaagcggggtctgcaaggaacatcctgacgagcttcaaacaagctggggttcgtggggtagacaaactgcttcctgggcccagaatcattgtggagggtcactgtgcatgtgtgtgagggtgagtaggtgtgtgtttgtgcatatatgtattgtatatgttgcccataacatctttgtatacatacacgtgtttgtgtgtgtctttagtttgggtatggatttgtgtatgtgggcacaggtgtgtattgtgcacaagtgtgtgcgcgtgtgcttaagtatcttcattgtatatgcttgtctataactgagtgtttctagcacttatgcatgggatgtgtctattgtgtatgagtttgtattttttttttttttttctgagacagagtcttgctctgtcgcctaggctggtagacagtggcgcaatctcggctcactgcaacatctgcctcatgggttcaagcgattcttgtgcctcagcctcccaagtagctgggattgcaggtgtacaccaccatgcctggctaatttttgtatttttagtagagacaggtttttgtcatgttggccagactggtcgagaactcctggtctcaagtgatccacccacctcagtctcccaaagtgctgggattacaggtgtgagccaccgcgcccagcctgtattcattaatttgttttttcatttggcatgtattgcctgagccctgctatgctccaggaactgctctaggtgctagggatatgatatggagggtctctctgagtttacattcatggagtagggggataccgatggctggggatgccgaagttctctttcctgagtgaactcaacaccttgggcgaagtctgtggttcccacaagtgcacctcagtccttcatcactaaattggggaccatacccttctaaacccagcttcctgggctgtgagatgaattagcctagggtaggctcagcggcagagaccaaggagactctaacatttccatggattgaatcaaagtttgttcttgctcacatccagtccagagcagctgtgctagtaattctgctcccttgttttttttttaaatttttgtaattttaattttaatttttagaaacgaggtcttgctctctctcccaggctacagtgcactggtgtagcactggctatagctcactgcagcctccaattcctgggctcaagggatcctcccgcctcagcctccagaataactgggtctacaggtgtgtgctaccatgcccagttaatttaaaaactttttttttttgggggtaaagacagggtcttgccatcttgcccaggctgtgctcctttgtacactggccccactattgaccagccacatcgcctcaagcagcttcctttgctttcagagccccagcttcctccatctgtaggagtgggaatgataacagtacttacctcatagggttgtgcgaggactgagaaagcacctttggtgcaaagaatggtagcaattgatcacgatttctaatttaatttttgacttgtattagagaaataaaaatactacagttagaccaggtgcagtggctcacgcctgtaatcccaacactttgggaggccaagaaggacagatcacctgagattaggagttcgagacccgcctggcaaacatggtaaaaccccgtctctacttaaaatacaaaaattaactgggcgtggtgggaggcacctgtaatcctagctactcgggaggctgaggcaggagaatcacttgaactcaggaggcagaggtttcagtgagccgagatcgtgccactgcactccagtctggacgacagagtagaactccatctcaaaaaaacaaaccaaaacaaacaaacaaaaaacaaactacagttacagagcagagtcctgtagcatggacatgagatagaaaataaagaatcttatgcttctgcctgtggcagtggagaaagaaaatggagcgatttgcataggtgcacacaaacactaattctcaccatcacagtgcaggctctcaatcctcaactgtcactgaggcccttgaagtagacccaggtgcttagggggtggcagtcagtgcccacaactcaacacttaactgtttatcaccacaatctcttgctgttgtttcagggagagaagtaatatttattgaacatctattatatgccaaacagtgtgcttggtgctctaaccaccttgactcattgaattctgatcacattgtagtggtaggttttaattatttccattttgaagatggaaagatggaggcccagggagtttatgtaattttccaatagtcgtttagctacttaaaaaggaacagtgatggggatcaagccgagatctttctccaaaggtctttccagtgaacctaagcgctagctcccaaccttactgcaaggacgttgaaggtgagggctgatgtcttgagccgtttctgggtcttccccatgctggagcagaatggatgcttgacagacttgggatggttgatgtgtggaaggaaggagccctgatttcaggagctgactcttatgcggggagtcgggcagatacagataaacatgaggggttgggtgtggaaacactgggccatgacaatgcagtggaccctgagcagtcatggcttccagtctgcaggccagcccctggcccccaaggcatcctgcaaacacagtttcccatattattagtcatcgtgttagcctgaaacacctgccccaacccatcccagcttgtaggctttcagcttcctgactcacttccccattttctagccattttcccattttctagcctctttgttgtcttggccctatgaacttttccccagtgatgacttgtcctctcttaacgacaattcagcacctgcctctggagaggtgtctcaagtggtcctgggtaaacaccctctgcttctgaccttgttcctgagtcccggacttgggtggctgagaagtgtagcatccaaggattatcttccccttcatgactggtagaaagggaaacagtgggcagctctgggccaagggccttttcactttatagactgaacctgcattatagccagcagctactcaaagctgctagcaagcagatgcttggttggcctctgccttcttgccctgcctcctgggctgcgatttcctgtggacccaccccagcctccatcctgagctcttcttctctttatgcacttgttctaggcaggattccatggcttccctggcaaccagcactgggtaagacatccctggtacaggttcccacagtaccttgaattcccctccatcatggcacctggccttcagtatcacaattgcccagttgcttatctgtcttgcctaaaagatggtaagatctaagagggcaggtactgtgtctcttgtttacccttgtagcctccacaccttgctcagtgtctgggacatagtaggccttaattgatatgttttgagttggatcaatcctcagagactagaccttccgcatggggaaaatgtcccaagtctggccctcccttactcacgtgcccttcagctgttcagaggtgccccctcctagaccccatactcaagaactttcaacttgggtgggcccctctgatggtgagggacggagagtgtgggggaaccatctcttgttactgtgtaatcatgtgctgggttggtcaccacagccccaccagccaccaggggacaaggcttatgtctcaggccagagaccagaacccagtgggaggcctggggtggggccctgttggaagggggccaggagaagagcccatgggtgtccaagtgtttccaggagtgggaaagaagatggcatctgccacaagagctgggaacgagggaagccaggcaaggtgcccacggccttgtcccaggcttctggggcaatgtgtcatcaccaaaggaatggaaacctgtactttgggaacttggcagccagggctgggtttttcgtgttttctgtaattatttccctttcgttctcccttagtatttagtaaagccctttgtgaaaatgccagctggtctcagctgtgctaagagtggtgacaaagggggactctgtgcgtgcttggccctaagctttaatggagggacctggcttaatggtggcagcaaagtcaaggaccatcaaggacatagggaggctctgggagccacagcccacacctcatgtccagacagcctcccgaacactgagtctcctcccaggctcttccaggacccagcttcaataacctgggctttattgaaacctggggggaatttgagaccagtctggacaacatagtgagaccccatctgtatgaaaaaaaaatagccaggcatggtggtgtgttcttgtggtcccagctactcaagagactgaggcaggaggattgcctgagctcaggaggttgaggctgcagtgagctgtgataacacaacaacactgctctccagcctgggcgacagagtgagatcctgtctccggaaaacaaaacaacaaaaaggaagaagaaagaaaagaagaaaactggaggactggagtgccagccatggctgatttgagagagggtgtttatatcccagtggtgtagaaagctcttctgaaatccagaggccgggcacctgctctgttccaggtaccccagagggtgacaatccctccccagctggggatggcttggtgagctgctgttcaggagcgagtcctctgagctatcttcattttctgctcttacaacacagggccctttctaagccttggacccctacctgtctgttgcccaccagggatggacaatcagccagtcccttcccagctggggatggcttggtgagctgctgttcaggagcgaggcctctgagctatcttcattttctgctcttacaacacagggccctttctaagccttggacccctacctgtctgttgcccaccaggggtggacactcagccagtcccttcccacctgcctgggacccaccacatccttagttcccgggactgtgcccctcttctcctaagcccctttcccatccccattgcagctctcagctgctctggcgagaggggcccagggagaccttcttcctcaggaacaatcacccctttctgttgtgtaagtgatacacgaggagaggaagctatttgtaactaattggctgtgatgaggaacggaggctttggagaaatggagagcctgcgatcgctcggggcggtcccgcctcgggttgacagctgggtggttctcctcagagggggcagtaggtcaccacttcctctgcccccactccactggggaggcctgggggatgctggcaggtggtggctcctgccatttgcacctactctgtgcaggctccctgcttaacacgctcaatacttggaaatttctgaaccaccttcaagggaagtattattgtgcccacatttcagctgagaaaatggaggtcaagagaggtgaagtcactcatgcgaggtcctgggtcccgcagcccgcaagtaacagaagcaagagaaatggacaaggatcagctgaggctgacctaggagacagtgtcggggagggattaagatcctgcttcttactggccgtgtgaccttgggcaagtctttgcagcttcctaacccatctcaggggcgggctgtgtggcttaaatgaggaagaggaagccaatcatgcagcacagtacgttgtaaatgcttaacaacttcagtgatcttgattgtttcggggagaaaatacatttcctccaagctcctagcagaccaccctggtcacctgtcagggaagccatcccagaacaggagagtctctgggttatttctcagccctccaaggggaggagccaacctccaagacccccttctccatagagaaggatctggggataagatgagagagaagagggtgcccatgtccatggggcctgttctgtgtgccaggcacataaggagacagaggtgatcccagttcctagacaaccacagataattatgaatcagcctctgatgaacacagccaaggtacaaaatgctaagggagcataaacggtggggaagatgatgctaggctgcgtgtgtgcgtgtgtatataaaggtggggaatcaaaatacatattggatctccctggcctgggaatcctgaccatcccttcccttagggaaggcatccgagccctgctagaagattctgtgaaaagggagaggagatgggccccgggaccagggcctgaggcttcttggagaaggaggtcttaatgccccagcgtgtcttcaaggtggcagtgtgactaaagtcttcttcaggggacttccccaccccaaatggggaaaaaaaaaaaagcaatgcctgctttctgggtggtaactgaaggacttccctgagcgactgtgggaggggcttggggtcccccatgtctcagagacagaggaagcggcccctcaccctctgcacactgtgtccaaaggctgcagagtcgggaggcagccagtctggccccgaaggctgtcactcggcatcccggagctggcactggggtgaaggtctggagtctccgcttggcaggagatccagtgctcatcctgatccggggagcctgggggatggcaaggggctaatgtgcttgttgggagtgacgctgtctctgctagggagcaggaggtcagtggggacagtacggactaaactcataattggagcagcatggatctgggtgaggacactgggagagctggatctgttccattttactgtcatcccttggagtgttacagcttggtcagttgtcctctgtgcttcagagagagcgaggccagggtgggtgattccacaggaccagagcacctgtgtggcaggctcagatttcatccctgacaaagagcagaggctcctggcaggggtggcctgagctaaggaggaaggagacaagaaactgagtgttctatgagttcttcctgcattcaaccctgtacggtgccagctctggctcagtgctggggacaccaagacggtgatggctctcgagcagcttccagtccaggaagaacagcttaacattggcttaataccaagtctgtgcaaaaaagagcttccaggggctctgacgcagacttgtggttgcaggcagctgagcaggtctgcacgttccaggtggcctgtcctctccagcacattcaggcgtgtggaagacagagtgttcgggagacttctgaggaggcccacagagggagcaggaaaggggtcaagaaagatgtgacctggagaaagtaatgcttgtgtagcatcttacaggacggattgaagcttatgaggaatagaagggcagaaagggcattatagtcaaggagtgaagctggacacagtatgggttatttgaggaacatctaggaatctgatggggctagactgtgtgcaggggaggggaagggctatgcctggaggtgaggctggctggggtcaggttgtgaagagatttgaagaccagactgagagttcacagtttattccaagggctctagggagccatcgccggttcttgagcaggggagtgatatagccagatgtgtgttttggagaaacaactgaggacaggtgaagggtttgtcccagaggcaggaaaacaagatctgtggttactgcagagctgagtggcctgaatcaagacagtgaccgtgggaggagagggatgggacccagtgtcatcctgataaaataatttgtttctcagccttttttggagctggctgtggccttggaactacgttttggccaatccctgaccccttagaatttcttagggtctgggtgtaagtgaaaatgttgggcttgacctttgggaagtatctttaaaggaaggagcatgtttcactgcttccctatctgccagacattgcctggaattcaaacctgatggtaggagctcttgcagtcatcctgggccatgagaattatttgcaaggaaattggtaccctgaaaactgtgtggaactgccataccggccctgacctgcttacatccagaattattattatgtgttggagaaataagcttctatcttgtttaaaccactattattttggagttttctattaaaatgtgctgtttcccatttttgccttctaaaggtgagaaaattagtcccatggttctatatgagtgtcatagagaaaagattgcattcttccatggctcctcctgggaagtgagtcacatcagtttcctgggaagaactgggctcttccattccctcccagtttgaagcaggaacgaggaggccacagctaaggatacagatgttgtggtccagctgagctagaccagcctccccagatgcatccctccctttcagctctcatctcccatggagcacaggaaggaaactgtgttgggggcaaggggtgcagaggggagccggattaattccacttatggttggatctccaggggtggaggagacagaaagtctagcagagctttcagcagacagacagtggacctccagctggcccctcgggccttggactcttctatgagtcaaagaacacttggctgcttctccaaagatcctcctctgcctccagcttccttcatctgaaagagcaaggtctcgagtctatagcccaagagatcctaagggacaggattggcccctactttgggtgtaatgaggtgggggtgggagggcgtggggtgagaatggaggtggagttggaaactgacatctgtgattttactctcttactttccagctctagcttcaggtcaggaaagctctggggagtccagttctcccagatgatgaattcaatgctccagatgacatcatgcacctgaatcatttccgtatctttcttccaggagcctgcagaattccctggaacccatattcaccaagcacttactacatgtcagggctcatgtatacatgtgtgatcttattcatttctcacaacgggcttgagaggttggcattggtcccactttagtgatgagaatcatgagcacagagaggttgggtaacttacctcaggtcacccagccagtaggtggctgagctggaacttgaacactagttatatgatgccagaccatgctttttgcattagacattgccggggtcccgtgctggggaaggcctatgctgaggtcacagggggcagtatattagtccattttcacactgctatgaagaaatatctgagactgggtaatttataaagaaaaagaggtttaatggactcaagagttccacatgactggggaggcctcacaatcatggcagaaggggaaggaggagcaaagtcacgtcttgcgtggcagcagacaagagagcgtgtgcaggggaactgccctttataaaaccatcagatatcgtgagacttactcactatcacgagaacagcatgggaaaaacccacccccatgattcatttacctctcactgggtccctcccacaacacgtggggcttatgggggctacaattcaagatgagatttgggtggggatacagccaaaccatatcaggcagtttgcaggtgatcccacacccggatcagattgtaaaggaggggcccaattccccctttccaggcctcctgcctctcattccctcgtagcacctcccttttttcctcatttttacttctggttgtctgcactggaaagattttcagtgacaatagatttgtgattcaaccaataatagtattaataatctcttatagagacgtatgatttcagactcctttcatatactttgtgctggaaacaccgctgtgaggcagatgaatgaggtgagggagactcagagaagctgaagaacttgtccaggcccacacagctagcaaggttagaggtcagaaccagaactcaggctcctggttccttatgctgcatggagtctgacttctgatctcagtcctcttagcacttttttttttgagacagagtcttgctctgtcatccaggctggagtgcagtggcacgagctcagctcactgcagcctcaaactcctgggctcaaggaatccttctgcctcagcctctcaagtagctgagaccacaggggtgcaccaccatgcctggctaatttttttatctgcagagctgaagtcttaccatgctccccagtctgatcttaagctcctaggctcaagcaatcttcctgattcagcttcccaaagtcttgggattacagaaccaccttgcttggccacttagcactttctgaatgacatctaccttgttccaggccctgtgctgggtactgggagagattctgaggcttaagacacagtctcagcctttgaggagctgaaaattcagcagtaaaaggaagaaaagccaaggaatcacacggagacagtaaagcagcaattggcaggggtctcagaagagtcccttggaggtatcactcctcctagggatgtctgcatctccccagagaccaaaattatcaataaccatgtgccacagtcatgctgcttgccatatccaaataccatctctattagtctattcttgtgctgctaataaagacatatccaagactaggtcatttattaaggaaagaggtttaatggactcagagttccacatggctgggaaggtgtcacgatcatgatggaaaatgaaggaagagcaaagggacatcttacctggcagcaggcaagagaaagcttgtgtaggggaactcccctttataaaaccgtcagctctcgtgagattcactatcacgagaacagcatgggaaagatctgccgccatgattcaattacttcccactgagtccctcccacgacatgtgggagttacgggagctacaattcaagatgagagttgggtgggggcacaggtgaaccatatcgccatctgtagtattacttatttaccgtagtcccccttatttatcgaggatatgttccaagaccccccgtggatgcctgaaatcatggatagtaccaaaccctatatagtctgtttttttccataactacatacctgtgataaagtttaatttataaattaggcacagtaagagactaacaacaataagtaataaaatagaacagaccaggttcagtggctcatgcctgtaatctcagcattttgagagactgaggtgggaggatcacttgaggccaggagtttgagaccagcctgggcaacataacaagaccctgtctctattaaaaaaaaaaaaaaaaaaaaaaaaaaaaaaaaaaaaaagaccaagcgagatggctcaagcctgtaatcccagcactttgggaggccaagatgggtggatcatttgaggtcaggcactcgagaccagcctggccaaccctggccgacagggttttacctgaccaacaggtaaaaccctgtctctactaaaaatacaaaaattagccgagtatggtggcgtgcacctgtaattccagctgctcaggaggctgaggcaggagaatcgcttaaacccaggaggcagaggttgcagtgagctgagatagcaccactgcactccagcctgggtgacagagagaaactccgtctcaaaaaaaaatagaacaaggagaacaatatattgtaatgaaagttatgtgaatgtggtccatctctctatttctctttcaaaatgtcttactgtactgtactacaggtaacagaaaccatggaaagtaaaactggataagggggactactatatttgtttaagctaattgattcttttttacttaaaaatatttttaaaggaaactttgtatcactaccttaaatagaaaggtaactacaaaaatcaattaaattatagctggatttgctggcagagaatctaagcccaaggcccactttctttttgtttaaaaggaaaattagcaagtgttagtgaggtgttatagacacattacctcctaaccaaggctttcttttggctcattaaaagtttggaaagagaattggaaatgggacagctttctcactccatgattcaatgttattaaaggctgtgtttggagtccagctaaattcatcttaaacatgcccccaaaacatctcatatgttcatgcttgagatgaaccagtgacatagaaaaataaacattttaagctcatggtctgggtaggggtgacgtctaggggagcagaacctcagctggtaagccactgagggcaacatagaaggttcctgccatcttctctctgaaaaagaacaagaagaatagggagattttcagccttggcacatccttttacaatgtgcagagaattttttttttttggcagtcttgctctatcgcccaggctggagtgcaatggcacaatcttggctcactgcaacctctgcctcctaggttcaagcgattctcatgcttcagcttcccgagtagttgggattacaggtgcgtgccaccatgcctggctaatttttttgagatggagtctcgctctatcgcccaggccggagtgcagtggtgtgatcttgccacactgcaaactctgcttcccgggttcaagtgattctcttgcctcagcctcctgaatatagctgggattacaggcgcgcaccaccacgcctggctaatttttatatttttagtagagacagcgttttaccatgttggtcaggctggtctctatctcccaacctcatgatccaccctcatctgcctcccaaagtgctggggttccaagaccccccatggatacctgaaatcattgatagtaccaaaccctatagtctgtgagccatataggcgtgagccactgtgcctggctgattcttatttttttattttttagacagggtctcactctaccacccaggctggagtgcagtgatgtgatctcggctcactgcagcctctgcctcccaggttcaagcgattctctttcctcagccttctgagtagctgggactacagatatgtgccaccatgcccggctaatttttgtattttaagtagaaacagggtttcactaagttggccagactggtcttgaactcctgacctcaagtgatctgcccgcctcggcctccctaagtgttaggattacaggcatgagctactgcttctggccacatgcagaaattaaaaaaaaaattgaggccaggtgcggtggctcacgcctgtaatcccagcactttgggaggctgaagcaagcagatcacttgaggtcaggagtttgagatcaacctgggcaacatagggaggcaccatctctaccaaaaatacaaaaaattagctgggtgtggtggtgcgtgcctgtggtccctgctactcaggaggctcagtgagaggatagctggagcccaggaggtggaggttgcagtgagccgagatcacaccactgccctacagcctgggtgacagagtgagaccctgtctcaaaaaaaacccaaccaaccaaccaaacaaacaaaaaagccatttgaagctcacagccctatgaagcacacaaaatagtactttctgttatggctgagaaaactcagctggtgaggttttcagggaccacccaaggtcatccagcacgttatcccacaaaatactgagcaaatgcttgatgcccctctctggaatcacatcatcctcaagcaggagcatgtagtatccactttgtaagagaaatctgtcccccatcgaagcaaaatctggactttcagaggttggtcctagagaaagaacttctgctggagccatcctgggaatctgatctctgccttcaaaaccagattcaccttcccttaggagatctctctctttctgactcctgctgctaccacctcattggtcccagtgtttactcaagggaaggaagatcagaggggaaacaaacgccaaggggttgggaatgggtcggcatctggagtctgagacagctgccctcctgcgtcaagggctgggggcctcagcttccatcctgtgccagcctccatgtggacagctcagcttattgtccaccacctggaaattcctcgaagcttcatggtccaggtcaagagaatcctgttcccagacctctgcccagccaggccttcccagctcagggctgactcctgcaccaagtgacgcacttttcataactggtctaccaatgcctccccttcaagtgagaactaccctttacatttaggagtgtggccccgcagtaaaaacacactaaatttgtcttaattcaataattaatgtatattcattgtagaaaatacaaattagcataaataataaacattatccaatcttattactcagagaaaacccttattaatattttgttatatccttgtggatattttctgtgcatgcatatatttttttccttataaaaatggcgtcatggcaggtgtggtagctcacacccgtaatcccagcgcttcaggaagtcaaagtgggaggattgcttgaggccaggagttcaagaccagtctgggcaacatagcgagaccctcatctctacaaaaaaaatttaaaaattagttagtcatggcagtgcatgcctcttgtcccagctactagggaggctgaggtaggaaggtcacttaagcccaggagtttgaggctgcagtgagctttgatctcactactgcacttcagtctgggtgacagagtgagactctgtctcaaataaataaataaataaacaaataaaatgacatctgttttgcagcatgcttttcttcattttatcatattttgggaaggccttttcatatcaatggtgaaaattctacagctttgctgctcaaacagtggtccggggaccagcagcattggcatcacctgggagcttgttgaaatgcagaactttaggtctcatcgcagagctattgaatcagaatctgcattttaatgagattcccagggaattattgtgcacattgaagtttgagagcacactgtttgacatcattcttaacacttacatattgttaaatacttaccacttacccaggggatacttaaaactgcatggctaaatttttttcttttctttctttctttctttctttctttctttctttctctttctttccttctttctttccttccttcctttctttctttcctccttccttccttccttccttccttccttccttccttccttccttcctttctttctttctttctttctttctttctttctttctttctttctttctttctttctttctttcttctttcctttctttctttttttttgagacagagtctcctcctgtcgcccaggctggagtgcagtgccacaatctcggctcactgcaacctccacctcccagcttcaagtgattctcctgcctcagcctcccaagtagctgggattacaggcacctgccaccacgcccagctaatttttgcattttcagtagagacaaggtttcaccatgttggccaggctggtctcgaactcctgacctcaaatgatccacccaccttggcctcccaaagtgctgggattataggtgtgagccactgcgcctggctaaatttttcttttcaaactcacctataattgggctttaggatttacctaatgttttctccattattaacaatgctgtgatggacatctctatatgtagttgctgctcatgtcctttaaattcctagaagtagaatttctgggtcaaagctttcgatacttattgtcaacttgctttacaaaaaggtcatcctagtgtgcagtccttcctgcaacgtctaagagtgatgagatccctacaccctgacagtccctggtactatcattctttgacatctttgcccatgagttccatgaaagtcgtgcctcagggttggctttggacatatttcctttgttattggctggtccagttgaacatttctctgtgccagtgttggccatttgcatttcttctggctgtgtgcctgctggggtctttaatgcctgaagcccaccaagatagtgggagatgttgccagggagggctgcagggagtgtggcctgagcccagccctgatgcagagtcctgcacatagtggtcgctcatgttgctgcctggctgagggcacagccaacttgggccaaaactcagacccagcctggcggcgctcttgcggtcccagccttgtgctgtgtccagaccccagagcaagtgcccagccaaggtctcacctcctggcctgtgaggcctgggtgccggctgccacccaggatggtgcttgcaggccgggccaggcaccccatgattccccaggcagcaggcgggtggccaggtgtgctgggaggagccagcggtgaggacaattcagggaagtgaccctgcccagtccccgagctcctaccacagcaagcattgtgagcctcccgctggccacggtggctgaagctgctgacagtggcggcaggaagtggggcgcttactcagcccaggctgcacgtggctgggcctgctgcctccctccactcagccttcctcccagacacagcctgcgcagccagcagctgggggaaggaaacaggagggaccaccccccacatcccctgcaaggctgtacctgtgccctgccagctctgccacctgttactgactgggcatgaggcctgccccagggcctctgcggcagagcgaggagtggggctggggtgtggggtgggcaggtgggcttggggtaggatctgcactgacatctactgaacgtaccaccctgagggtctcactccacccaatccccacagccccgggactacgagtactattcacctccctttcactaacaaggaaattaaggctcagaaaacaggagtaatgatagcttaatctagaattacttccaggtgccaggaactctgctgcacacttcatatgtgttcggttatttaagcctcacaagaagagtgggtgcaataggagccccattttccagatgaagaaagccaggcatagagaggtggcagcacacagcctattagggacacaccttagtgtctggccccaaagctcacacccttaactgcctcccgcactagcaggtgacctagagcctcaggcctggctgagagtggcagtgaggaaggggagggggccagcccgctgccctcattagattgtcttggcgctggccacctgtcccccacaggagcacccaggtttcaccccactttgtcgcccaaccctgggcctctgtctccagtcctctcctgtgtctcctgccctctaaccaggcagcctttggggactgtctctcaggtgcttgtcttgctcctcctctggctgtccctgtcctgctctttgacccctgaccttgggtttctctggctcttctttttagtaggcaaaagggggaaagaaggaatttgcatggaatgcggcaaacatcccgtcagagggcatttctggaggtgcctctaattgtggcctccagttgctatgggaagcagaaaagtgtctcccagctgggagcggtgtgggtaaaggataaagccgaggggaagggagagaggagcctcttcaggagctggaggcccgtgggactggggtccggaggatgagcgctgcctgctgcccagaacagggagggtggagcagccctgggccccacgcgcctggccttcttccacctcccactgtgatggtggtggccccaggctgcccctgggcctgtagcagctgttgctgctgatgcaagctgttggctgcgggaggtgggaaggtgatgaggaaggagggagttattctcagggtgagggtctctgcgtaagcctgttgacaagctttcaagtctgcaggacaggactccgggtttccaaccagattcacttctgtcccaagtggggcccaaggccaggcctcccgaagccttttgcgatcagggtggagtccaaccaccagctgttatggcaacctgtatctcttcagggctgcagggagaggcctggagcccgcagcccaagggaccaggggctcagaagtgaatggcaatgggcaaacccatgggtatgccaggaggaaccctactgggtaagccccagagaggggcccgtctctggcccagccgcttccttccagtccttgcctcttcccggcagtgtctcctgggtctggcctaactaagctgggcttcggccaagctggccggcctccaggtggatttgggacagacagctgggatgtggtgtttcccgctctgaagagatagaggctggagggggccgtgatggggctggagcctggagtgctgggcccttggccacttgaccacagcaggatggtgggggtagggtgggtgggctggcgggaatgtctttggtggaggtttcccagggaggggaggtgtcagaggagtacggccaggtagcttcccatacctccacatgttctctatctgggtggggaaacaaatggctgttacccctgagacctaagtgggtctctctggtgggtcagccagctggccttggcacctgtcttgtgtcctccctaatggctcgcactcactcagctgctctcctccctgggtcaggtcagcctggcccagggtagcatcaggcaatttttacttgcttctttttacatgtcctgggggaccgtcatagctgcctggactccttgattctggcacagacactgtgttcagctcctcaggacaacctgtgcttggctctacggggcacacatgaatgaagagcacagccctccttcccaccacacatacacacagctgccaggttccattgccagctttggtcatccttcctgtccttccttgtctggatgactccaatccatcctttgaggcccatgtcaaatggggagctgtttctgcccttcccacctgctccaggcagaatcatccatctcccctctgtgcccccttagacaaagcatgtaggaggcattgagtgaatgaagcttcccaaagggccattaggatccttccagtctcctgcttagaaaagttccctggcccccattgcaaaaagcccttttgcactctttggcttcatcatcccctaggctgagccggagaaccctctgctccaataaagtggtctcctagccttccaccaaacttggcctgaaccttccccactccatcccctgctcaggccaccccttgtcctggaatgcactaccaccatgctcacctcttgaaactccactctgcaaggcctggtgtctcttggtgtcctgggaggccagtggctcccaaagggcatgggagagaccccctcttaggggcctggtgtttttcttcctttccttccccttgctcctcctctctacggacttttgaacaacttccaggatacattccataaatttgaaggaagcagtaactaacagcctcccattaatgttcccgtgtgcgcacacatggagtgtgccattgtgtgtggatgaacatatgttcatatgaagatatgagcaagcatgtacatggagataggacctatgtgcaaaaatgagcatgcctgtgcgtgtgtgaaagtgggcgcgtgcatgtgcatatgaacatttttgtgcaggtgagcctgtgcagacatgccaaaatgtgtgcatgcatcgatgtgcattgcaggtgtgtgcttgtacatgctggtgaatctctatgtgcatgttgggtatatgtgctctagtgagcttccttttgcccagcccaggggtactggggaaggccaaagccagtctgccttctacacctcgccaccctcaacctccagggaagtgaggaaggcttcacgttgcatcctgacttttgacagagataaatgaaattcctgtgaggttgccaggctgcagcaaagagcagctgtgagtggcaggggtccagccccagactggcctggcccttggcctccagccctcagcacaccgtgtcccccatcgaagtggtacccaggatgaggaggactcaggacaggttcagcaaagggtaatggctctgccctggtccccaggcaacaggctctgtctctgggcctgcaagtttgcgcctggtggtggggatgatggtggggccagagtgcctaggagctgctagatcaaatggtgctctttcctctggggagtgaactctggaggaacaaagcaataggttaatggtgcaggaggatccatttatgtgaacccactttagatagaacaaggaaatacaggtttaaagtgcagcaaggaaggtttagctagacttaaggaaggagtccttcagtggcaaaggctgcaaaatctgtgtccacaaagatctggacaacaggatccatatccacccatggggctggtggaggtggtcggaggcaggagactggctgggatgacctttagaagtgctccctccccacacagtcctggctctgtctcggggtctctgcagctctgtggggacccagaggggagtctggcagggaggattggccgggcacacttctgggcactgctcccaagctccttcccttctctgcttcctccagaaccttcttatccttcatttcctgctgccctcctctcacctccaagtggctgccccagccgtgcccccaaagtggcttcctcactccctccctgctgctccagaattgggaaagaagccacaaattcccccagcggaccacccccaaaggcccagccccgtctcacccacgagaggtgcttagaggcccaaattgggtgcggctgcggggaggtgggagccaggggcctcggtaggcatcatccctccaccagggtggtctcgaggagacaaggccaactgaacagagagagtgcgccctgcaggcagggtcacaggagccctgaggcctccctctgtccggggcctccctctctggggggcttcagggcctgtgcttaccctctctggtggcttcctcttgctctctagggagtggcctgtggggaggacatgcagacacgcagaggtgcttggggaggatgtggagggatagagggtgccccctgcaccccttgctcccctctcctcctcctcttcctcctccttctcctccaggagcccctgtgccttccctgggaggtctgacccaggcaagcccagggacgaggggaggcagtcattaatcaccattatttattatttcttatgtaacagggtgttatgaaacatgcaaccctgtaccaggcacgactgggaatatgggaaagacagtccctaccagtaagagcttcctatgggatgaccaggtaggtccaggagccactgagcaacctgtggaccagcctggaacgtggggtgcaggccaggctggaggcgggatggtcctgctgcagctgaaaaaaaggaaaaaggaggggagtgggcagcgggaacctcaaggtgggaagggagctgggtttccacccccacccctccgcacctcgccaggccaggcgcagaccagctctggctctggggtggcctgggtcacagctggagttgtcacaatattgacccaggaggagataacatccaaagggcttggagtcccagtcggacaaggagggggatgtcgccggaaaagatccctggcccccagggggatcaaactaaatggggctttaataggtctcttccagctcagatttcatggataattggaagcaggtctccagccaggcagagtgggcggccctagtggcctgccgggcggccaccgcagccaggagacaaggagggacaaggcggggtgggggtgccacctccatgccaccccactgtggcccagtgggcctctggccttgctggggcttctgggctcccttctctgtgttccagaagtgctgctgctttaaccccctcagggaaggaggtggacaagtgaggagacctgagtcatttagctccggggaaggagagcagcctgtcccagccacacatgcccgaggcttcttccgtcattcaaatacacattcacatttaaagctgggaacaactctgaaaaataatgtcttcattttttttcttatcacaaaaggggtacatacttgctgaaacaaaattcaaggtatattaagtaaaaagtgaaaattctctccccaccacacacccattactcctctgtccctctctcaccacccccagactctgcaggtagcctctgactgcaatttattggctatctttccagagcatctccaatgccttctgaattacatcctgctgctttcgctcagcaatgcatcattgatatccttccaaggccagtaattagggtgtggacattcgtcactcccattttaaagatgaggaaacagaggctcagagaagtttcttggctgtcccgggctgcacagccaggcctcgtgctcatcctaccacagctttcagcctcttccctgggggcaggaggatgtgaggagcagagggctagaaaagccctgggggggtggtgggttgggatgggggagaggggccgaagaataagaaggaagcagcagccggcgagggagggtgtgaggtctccttggaatgcggcggcggtgcccctcctccctgaaggatccaggttttcctcaggcagcggagcctggggccctggaggcctaggctgggcagagctgagcagctggcagtggaggggttttcaaggcaaacctggcaagaaggcaagacggattgcatttcagcctgaacgtgcctgggatatgcacatgtctccccaggccttaggggcatttcttgcctaacaccaccagtgggagctggctctgcccctgcctactgaggctgacagctgggcctgtgtgctccctccacggctgctgccgtctctagcgccctggcctccagcacatccagcagtggaggggatgccccttattccagccatagcctagagcagccaagagccagctcttactcacagagagcctggggcactccctcagggaagagcctgaggggacaagcaggtgggaggccgatgtggcctgggcctcggcctgaagagtaaacaaggaaggctctggaaagctcgtgacccacaggccttcacgccagacacacagccttcctccttcctgcctaggacctccgagagggaccccgggaagccaagaggacacggaggatgcgtggggaagaaaatagccagtgtccctcctgggcggacgtaagcacacatccccaggtgcatgcatgcgcacacatgctcatgcacacaggcacgaatgcaggggggagaactcagaagtgtggaacagctgcccagcagagagggctggagggatgctcttgggagaggcagggccagggacctagtggtctttggagagctcttcactcctgagattgtaaaaaaatgctcccacaggtaccacccagaccttggagggggtcacagagattctcccacaaggcacttaggccaatcagggaagaggacatccatccattccgtttgccaatatccttagtaaacttactctgtgccaggctccatgctgggagtacagaggccacccgcaaggcttgactagcgccaagcaccagtgggaatgtgggaaagaaggtccctactggaaaagctcatcctccacatggagctggctgggcagttgcggagggactgcagagcaggctttggccaagcttagtcctggatgaagaccctgcacccccaccccagctagtggccagcttaaaaggagcctggaaaggctgatgtctgctctctgcccacagcccacccccatccccacagtcctggccctggctggggccccaggaaggaaatcactaaggaggattgagtgtcaattcacaacctaatcccatcagcgcacacagctacagcacgggccgccccctcccctactctgcagaccctggcggctgccggctgtcaggcccggcccctgcctggctgcgaggccaattactgcggccttaatcaccacggtggcggcggcggcgcggcgttaacaactgtctgctcatcagtctccttcctggggcgtcgtggaggggatgaccccatgcggctctcctcgaaggagcttgaaactggatcccaacaacagcccgatggccgccgtccagggaaacgcctggctccctcctgctgcctgctggtctcctgtgtgtttgcccagctcctcctgtcctggggctgagagcccatgaggacatgcccggggaccccgcatccgctgagcgagcactaaagccatggttccctctggttagcactgccaacaactgagcccgggaagaccgacgctccctgccagccagagcaaattgggtgcccggatgttgaggtctggttggcatttcctgtgttggctttggctggtgaggccaggccagtgggctgccctcttgacctgagcggagtcaggcaggcacgtcccagactcttgagcccactgagttctttcctgcgccccacagggagtcttgttctggaaaaaagatctccctccccgcctgggttcatgctgagcagccttccctgccttgtagggtgctctgacagcctgaggcctggccggcccccaacctggctgcctctgcgcctgctccttgggctcaggcggatcttggtgcttcctggatgtggtgaggcccctctgcacgtggccctccaggctgtggtccgggagaggactctgagctcctctgatctgctcccatctgtatgtggaataatttctccggcccaaagcctggacccctaggagccgtcagcaccgggttccagcttgggagcctgcgggagctcccattccccacccttgaagggccagcttcacctgaaggcttcaacggtgctggctccagttcctcagccctttttttttttttttttttggcattgggtctctgggacatcagattgtccaaaacaagacgacttcatgatacttgtttttccaaagaacacagtctgtacacaatcaggctttctgtgtgcagcgtggatcccgctgcccctgccctagtcgccccattcctgccctagccagatccctctgggacatggagtgttcctcattccctgtggccagaggtctctggcctagggctgagcaaggctgggcagagagggcagagctgatcccaccccacagaccatcactggcccacagtgcttccttttcttctcccagacttgggatgccaggagagcccctgggagaagcagcaggacgtgggaaccatctagagcacaagctctggagttagacctgattatgaatcccagctctactgcacaccagctgtgtgccttaaacacagtaccaaatggaacccggtcccttggtcagcaaaacggagataataaaggtacttgtagcacagggtttgtgtgaggggtcagtgggcccggcccatagtaaaccctcaacagctgtcatttacatagctactcctctgcatggggctggctgggcagccactaaggggtctgcagagtggacctaggccagccttaagccacacctgggatagagatgctgtacccccaccccactagttgcttccttgcccaggctggctctctcccgagccactcggctccatggccatcaaggatttaagacagggagctgcaggagtccctgaacccttgtttgtagagctctccacctttctccagggagagatgaggcacagcccagcaccccaggtcctcagggccaggcccatggatgctcagaaatttgctgaatgtgtggtgagcaaaggaaaagcctctggatttcctaccctgctcatggaggagcagtgggcatgatttttctggaaagtttggggggatatttatcaagagactggagagtgtttatcactttgaagagcaattctactcctggggttctcccttgggaaatcacctgagacgtcagaagtcaggcagggccacaggagggccctccaaaaaatttctaccaagatgtttttctcggggccatttataatagtgaacaaacaaaccaagcagacaaagaaagtatctcagtatttaagagtaggatactggtgaaatacgtgccattccatctacgaggaatgaaaaggcagccctaaaaatcatgtttagggccaggcatggtggctcacacctgtagtcacagaactttgggaggctaaagagggtagatcacttaagtccaggagtttgagaacagcctgggcaatgtggcaaaaccctgtctctacaaaaaatacaaaaaattagctgggtgtggtggcatatacctgtagtctcggctacctgggaggctgaggtgggaggatcacctgagcttgggaggtcaaggttgccgtaagctgtgattatgccacaatcatcccagcctgggtgacagagtgataccctgtcttaaaaaaaaaaaaaagaatcatgttgagaaaaaaaatttaatgacatggcaacagctgagttaaaaaaaaaatcagagtatttaacatctgacaaagtataatcttgaaaaacaggttatgaatggataaacaaaatgtgacacacaacagaatattactcagcatttaaaaggaaggaaattctgacacatgctgcaacatagatgcaccttgaagctaatatgctcagtgaaagaagccggacaggaaaggacaaatactgtatgatccacttaggcaaggtacctagagttgccaaatttggagagacagaaagtagaaaagtggttgccaggggctggggggaggtgggaatggggagttagtatttcatgggtacagagtttgggaagatgaaaagtcctggagctggctggtgatgatggttgtaaaacagtgtgaatgtacgaatgccactgtacacaaaataatggttaaaatggtaaattttagggccgggtgcggtggctcatgcctgtaatcctagcactttgggaggccgaggtgggcagatcacaaggtcaggagttcgaaaccagcctggccaatatggtgacaccccatctctactaaaaatacaaaaaaattggtccgggtgtggtggcacacgcctgtaatcccagctactcgggaggctgaggcaagagaactgcttgaacccgggaggcagaggttgcggtgagctgagatcgtacctctgccctccagcctgggcaactgagcgagattccatctcaaaaaaataaataaataaataaataaaattttaaaaaaggtaaattttatgttatgtctattttaccacaactttaaaaatagcttatggggaaatatgtcaagatgttcataatgaatatttttgaatgaagggactaggggtgatcttgatttcattctttttagtttccagcattttccccttagtaaatgagatgtttggttgtgtttgttcttggttttaaagaagctttctccagcatctcccagatgtgtgcgggggctgggcgagcggggagaggctgggtccagctgcagttagaaacgagggaggccacagtcatctggggaggggtggctcagagagggcgtggggctcctaggctcccctaaactctctcagccctactggctggcctccttctctgcctgccctctatgcttgggcctcgcccatgggcctctctccccaggaacagctctgtcactagcctgaaggggctgccctgggcctagtgggaatgtgggctcggggctttctcagacggtcagtgcccgagacgccttcccgctgctgctccgccccatcccagctgcaaaaacaacagcccatacccaaagccctgttattgcagccgagagtggagcctcagtggacagcggaaggagtggggatggggccggccagccctaaatggacctggggcaggggctccttggggaggggtagagtcccctcctgctcctcctggggaagcctggctctgaggtgtgtgggggaaggcgcttgcaggggcctgtgggacttggggactgagggtcaactctgccagtggcctccctgtctccctggggactgtgggaggtgggagcaagaggggggaggaagtaaagccacttgggaacccgctgagccaagccgtgggcaggaggcggcaccagcgtggctcccgggggggccagggccaaggctttcccacggagtgtgactggccaccgggctctgcagagctgtccaccccaggctggggcctatgagccttgggaagtttctgtgctctcttcccttaggggatagggactggcggccccgcattcagaacccagcaggactcttcctctccactccccggtgccctcaggtgtgtgccaggcatcttatcgaggctggggctcggctctcagaagcctgacgcccagcttccttggcacccattccactttcatctgtcagcttcatactcagggggcaaggagagggacgcagagcttctatcaccaaggtcctgaaggctttagaggctggtgggagcctggcccctgtctgacccctcaaggccattcctcccattctaacaagaaggatgtggccgtggtggaattaggaggcactgtggcagtctctggagacagacaccctgggttagaacctacacttggtccccaccagtggcaagccactcaacttgagcctcagcttcttctgctgtaaaatgaagatgttaacatgcctatgttaccgtacagagccctgggagacttcgaggtgattataaaaagtctctggcacaatgcaggtgcttcatcagtgcaggccactgtgattcttcttcctcaagccccaagaagggaaattagctgagactggaaagaattttctgacttcagttatccccacctccacattctgtgcaatggagagagcagcttgagaagttttgccttcttgcccgaaaaccctgctcagaaaccagttaatcaaactaccctctgaagttagacaatgactgtctgttagaatattcctggccacggccatcaaaccagggacagaaactattcctgggacagaggggagtcagatgcgagtgagggagtgttgggcctctggggtctgctgcctgcaggttggtcaccgagggccatgtctgctccaagagtggcaggaatctgctgggacccaggacacaggcatctggacggggctgcaccaccatgcaaggagtccttgaaagagacgttctcaggtagttaaaataactggggagtccttgaaagagaggagttatcaaaataaaagtcgatattatttttctctgaattgtccagtctgaaattacaaccaggtctaccagaatcaccttttatggagagttctaaaaattctcttatgtaatgggtatccagacctgctactttaaagatcggtagtaggtcgggtgctgtggctcagactgtaataccagcactttgggaggccaaggccagtggatcacctgaggtcgggagttcaagaccagcctgcccaacatggtgaaaccccatctctactaaaaatacaaaaattagccaggtgtggtggcccacgcctgtaatcccagctacccaggaggctgaggcacgagaatcacttgaacccaggaggcagaagttgcagggagatgagatcgtgtcactgcactccagcctaagtgacagaatgagattctgtttcaaaaaaaaaaaaaaaaaaaggccagtagtagtacatgtctctaaatgtttgagatccttaccatttatcagagttccctgttactaacatctccactgacagacaaggtcacccagcttgtgaggggcaaactccaggagatgtgtgtgactttcaaaccccagcttttaaatgatttaacgttcagtgactaagagaataactggctactgggccttgatcgccacttgttttttctttcagaatctcagactatattgttttgtgtacctaaatgattggacattctcacttagcagaagggacctatcaattgcagaataactatctgttgaccagaaccaacccatctcatagggctgttgtagacaccaaaagagataaggaaaatgaaagtctctaaccaaaaagcaaaaatcctctaaagtataagggatgatctgtttattagtattgagtttctccttgtacagggcctgtttccagtatgcaatgttggtgcttggtataaaggtgcataataaatatttgttacatgttaaatatgttgatctatgaagagcaacaattaatacacaatcctactaacaatagggtaagattgttttttttttctaatcacgtaccctgggttccactacctgtgtctgtcattagactttcccttcaaattcctagcaattggcctggcgcagtggctcacgcctgtaatgttagcactttgggaggccgaggcgggtgaatcacctgaagtcaggagtttgagaacagcctggccaacatgttgaaaccccatctctaccaaaaatacaaaaattagccgggcgtggtggcgcgtgcctgtaaatcccagatagtcaagaggctgagccaggagaatcactggaacccaggaggcagaggttgcagtgagctgagattgcaccacttcactccagcctgggtgacgagatcgagactccttctcaaaaaaaacacacacacaaaaaaaacgattcctagcaattgatcatgataaagtgtcagggaagctcaagaacagagccagatgccacaaaatataaatctgtatttagagcaagattaatttcttgtttagcagaagcaaccaaataacacactcctcccttgactgaaaataggcttgggctcctgggaggacacaagaagcttaggcaaggctctagcaacccaaaaagttaagccaaaggggaatttgttgagaagtccaagggtggctgtaccttcagccatggctagatctaagggcccatgtcagctcatctcaaatcatcagctcatctcaaatcatcagctcatttgttctttctccctctgtctaggactgggctctacttgcttctcctggagcagctggctgactttctcctacactagacaagctctccccatgaggcaggaaaggtagccaccgctagtccaaagccaacctctttacagcagatgaggacagaaacctgctttcttccagggtccatatagcaaatcacaggactgaatggctttgcatgaccaatcagcgtggaagttggatgatggaccagtcccaggtgtggggggccaggcctgtggttaggggccacttggggcacgaggaggtgctgggattgacagttccacccaaatcacatgagatgaggaagggcagttcccaacggaaagcgggtgcagggcagacaaaaacaacaggtgtctactacaatagcacttgttctcaggttgcatagagacatgacttatccaccaaaacaatcagagaaggataaaaacagtagtgcattcacatgcccaagtgttgagtcaaaggccttcaggaaaaggaagtgatcctatggcctaaaggagattctttggaacagaaggataaagacacaaacattttagtaagccttgctgcccccagttcagaattatcatcataatcaccgtattctccaaattaagtccaggaaactgttatttgataattatgcagacaatcagccataatgtttggaattgggacatttctggaaaatctggaagatttgatcaacataatcatatttctggctgaaagaatgggcctgatggatttcttatgtttcttacaaataacttttacttctcattatgaacggcatatgttaactgtagaaattttggaaaatacagaacagtacacaaataaaaataaaaatcattcttgcattttattagagttgggtgtgactgcaagtgatggaaactcctagataactgtggaagttaaacaagactgaagtttatttagctctcagctgtatgaagcccagaggtgaatattccaggctggtatgggagctccactccgcagagacctcagagtgtgcaggctccttctggctcactcctctgccatccctacagtaggacctgtatcctcatcacctaagctggcagagcagaaatgcagcaagaaagagaaagtcatgaagaggccaaagacccatccccgctatctcctagggaaggttctcaaaagcagcaacaaaatgttaatacttccacaccttcccattggtaagaacataggcacatggccacatctacctgtgaaggagactgggaaatgtagtttctattctgggtggctattttcccagctaaaactctattactataggaggggagagtggctttgggagcaattgtctctgataaacctgtaatcgtactatccagagatagtcactgttaatgtcatagtatatgtcattatacacacttcacacacacacacacacctatatacatatatatgtatgtgtaagaatatgtgtattgtgtatatttatatatatataatacatacaaataaagtatatttttagagtgaaattgaggtcccaccaaatatactatttttacatcctgctttaaaaaaattatagactttaggccgggcacggtggctcatgcctgtaatcccagcactttgggaggccgaggcgggtggatcacgaggtcaggagttcaagaccagcctggccaagatggtgaaaccccgtctctactaaaaattcaaaaattagccagccgtggtggcaagcacctgtaatcccagctactcaggaagctgaggcagagaattgcttaaacccaggaggcggacgttgcagtgagccgagattgcaccactgcactccagcctgagtgacagagcaagactctgtcttaaaaaaaatacatatagagagagactttaaacagcctctttcaagatctattttagcattgtgtcatttaacaattacagctagagttactttaaaaattcactgggcacagtggctcacgcttgtaatccccgtgctttgggaggccaagatgggaggatctcttgaagccaggagatcaagaccagcctggggaacatagcaagatcctgtctgcacaaaaaaaaaaaaaaaaaaaaaaaaaaaaaaaaaaaaaattagccagatgtggtggcccacacctgtagctgtagtcctcactacttgggaggctgaagggggaggatcagtttgaggctacagtaagctatgattggacccctgcaccccagcctgggcgacacagtaaccctgtctcttaaaagaaaatgaccatcccccaaatgtaatgctttataattttataattttcttttaaatagatgtttttatttcataaatcctggttttgtttgtttaactatttattttgaaataattgtagattcacaggaggttgcaaataaatgtatctccttctctctcttgcatccttccccccagactactccaatgctaacattttatacaaccatgacacaatgtcaaaaccaagaaaatgacattggtacaatccacagagcttattcagatttcatacatgcattccgtgtgtgtgtgtgtgtgtgtgtatatgcacaattttatcacaggtagtcttgcataaccaccaccacaatcaagaaacccaagtgtactattaatatcacaagattcctagtgttactcctttgtagccacacatcccacccatctgtaactcctggaagccactaatctattctttatttctataattatgttatttcatgattgttacataagtaaagttatgcagtatgtacactttttttttttttttgagacagggtcttgctctgttacccaggctggagtacagtggcgtgatctcagctcactgtgacctctgcctcccgggttcaagtgattcttgtgcctcagcctcctgagtagctgggattacaggcatgtgccaccatgcctggctaatttttttttttgtatttttagtagaaacggggtttcgtcatgttgcccaggctggtcttgaactcctgggctcaagtgatctgcctgtcccaacatgccaaagtgctgggattacaggcgtgagccaccactcttggcctatacttttgagatgggtttttttcactcagcataatttccttgaggttagtctaagttgttggatatatcgatatttcattcctttctattaccgagctgtattccatggtatggatgtacagtttgtgtaaacattcaccagttggaagacattgggtagtttccagttgttggctattatgaataaagctgccatgaacattcacctgcaagttcctatgtagacgttcttcatttctctgggataaatcaccaaaaatacaattgctgggttgtattataagttcattattagttttgaaagggactgcccaactattttcaagagtgattgtgtgcaatccgccttttaaaactgataatacggccgggcgtggtggctcacgcctgtaatcccagcactttgggaggccaaggcaggcggatcatgaggtcaagagatggagaccatcctggccaacatgatgaaacctcatctctatgaaaaatacaaaaatcagctgggcgtggtggtgcgcacctgtagtcccggctactcgggaggctgaggcaggagaattgcttgaacccaggaggcagaggttacagtgagcctagagcctagatcgtgccactgcactccagcctggtgacagagcaagagtccatctcaaaaaaaaataaataaataaaaatagaaaataaacaaaactgacaatatgttatcaacagttctccttattgttaagcatttaccatatcaaaattccaaaaatcgatattccattgtatgactgtactataacattcttttgttttgaaaataattatataacaaatacgcaatcataatttccatttcagttttgaagaatcacaaagatacatggaaactataaagcacctgaggtacctttcagctttcaagtctcaaaaacaagaattactttcaatagaaagtagctcatcttccaagtttaagagaataaagaagagaataaagagaataaagctaataccattttagctccaaatgttaatcagactactttatatcaaggtaatatagctcgcaagcatggtaacagccaggttgaaagtactttttgtactataatgttctagaccaatctcctaatttttaatatttaggtttatttctgatttttgtgttaaaaataataaagtgaaaaatattattgtgggctgggcgcagtggctcacgtctgtaatcctagcactttaggaggctgaggtgggcggatcatttgagttcaggagtttgagaccagcctggccaacatggtgaaaccccatctctactaaaaatacaaaaattagccaggtgtactggctcaggccggtaataccagctaggcaggaggcagaggcaggagaatcacttgaacccggcaggcagaggttgcagtgagccgagattgcaccattgcattccagcctgggtgacaaaaccaaaactctgtctcaaaaagaaaagaaaacaataaaaataaaagaaaaatattattgtggataactgtatgcctatttctgattatttccttagaatgcatttctaaacatggatatgctggctcaaagggtataaatgaacattttaaagtcttttgctgttttcccaactaaaacagctactaaaaggtgctttaatttgcgctcccacaggaatatatgagaattgggacaaaatttctaaaaatactaatatcgcagcacaaatggcagtcaaatggttggtatcttaaatgcagtatataaatagatgttacaaatcaactaaaaacagataaatacccaatatcaagttgctttggactgcaagtgatagagaactccattcaaaattatataaacaatagagaaatgtatcattttatataaagagtctaaaggtagggcaacttctggttttgttgatttcatacaaaattttaataaaagataccacagtacatagactaaaagttcaggctctgaagccagactgttgtgtttacattccagctcttccacttactaggtgtgtaacattgagcgagttacctatttttgcctcaagtttctcttttgaaaatggttacattaagagcacctatctcaaggtttttgtaagaatgaaaagagttaatatacataaaatacccattaagtgttgatattgtcaagagcctaggtcctttctgtttttcttttcttcttttttggtaagggggaggcagagctcactatgttgcccaggctggtcttgaactcctggcctcaagcgatcctcccacttccgcctcccaaagtgctgagattacatgtgtgagccaccacacccagcttctttctgtttttctgttctcctatcctcagcatgttaaccttattcccaagtcttgagacctcaggtcacaagacagctgcagtatgtccaggcatcatattcaaaaagaccagcgatagaagagactaagtagtcttctctgcttccttcttaagagcagggaaacctttccaggtaatcccaaacagacctctttcatatcctgctggctagaaaataggttacgctacaccaatttgtaaaaacaggagaatggaattaccatgattggtttagaccaattagggtttacccatgagttacagtcaccttatctgtagacagaaatcaagcaaaatcagttctgttaacgaggaagaagaaagaaatgaatttgggtggatgaccaaaatatctgccacacattgcagaaaaaggggcaaaccatatgaccagaaattcataagagaagaaatgcaaataaatatatgaaaaaatgttcatcttaactaataagcaaagaatgaaaattaaaaggagttgtattttcactatcaagttggcaatgatgaagaagaatgataatcatctacaacagcaacaaacatagtgagagatgacagcatgctggcagtcctcagagccctcgcttgctcttggcacctcccctgcctgggctcccactttggtggcatttgaggagcccttcagccccccccagtgcactgtgggagcccctttctgggctggccaaggctggagcccactccctcagcttgcagggaggtgtggagggagaggcacgaacgggaaccggggagcgcttgtaggccagctggagttccgggtgggcgtgggcttggtgggccccgcactcggagcagccagccagccctgctggccgcgggcaatgggggacttagcacccgggccagtggctgcggagggtgtactgggtcccccagcagtgccggccaaccggcgctgtgctcgatttctcgccgggccttagctgccttcccgcggggcagggctcgggacctgcagcccgccatgcctgagcctcccaccccctccgtgggctcctgtgcagcccgaggctcccctacgaatgccgccccctgctccacggcgcccagtcccatcgaccacccaagggctgaggaatgcgagcgcaaggcacagcactggcaggcagctccacctgcagccccagtgcgggatccactaggtgaagccagctgggctcctgagtctggtggggacgtggagagtctttatatctagctcagggattgtaaacacaccaatcagcaccctgtgtttagctcaaggtttgtgtgtgcaccaatcgacactctgtatctagctgctctggtgtggggccttggagaacctttatgtctagctcagggattgtaaatacaccaatcggcactctgtatctagctcaaggtttgtaaacacaccaatcagcaacctgtgtttagctcaaggtttgtgagtgcaccaatcgacactctgtatctagctgctctggtggggccttggagaacctttatgtctagctcagggattgtaaatacaccaatcggcactctgtatctagctcaaggtttgtaaacacaccaatcagcaccctgtgtttagctcaaggtttgtgagtgcaccaatcgacactctgtatctagctgctctggtggggccttggagaacctttatgtctagctcagggattgtaaatacaccaatcggcactctgtatctagctcaaggtttgtaaacacaccaatcagcaccctgtgtttagctcaaggtttgtgagtgcaccaatcgacactctgtatctagctgctctggtggggcgttggagaacctttatgtctagctcagggattgtaaatacaccaatcagcactctgtatctagctcaaggtttgtaaacacaccaatcagcaccctgtgtttagctcaaggtttgtgagtgcaccaatcgacactctgtatctagctgctctggtggggccttggagaacctttatgtctagctcagggattgtaaatacaccaatcggcactctgtatctagctcaaggtttgtaaacacaccaatcagcaccctgtgtttagctcaaggtttgtgaatgcaccaatcgacactctgtatctagctgctctggtggggccttggagaacctgtgtgtcgaaactctgtatctaactaacctgatggggacgtggagaacctttgtatctagctcagggattgtaaacgcaccagtcagtgccctgacaaaacaggccactcagctctaccaatcagcaggatgtgggtggggccagataagagaataaaagcaggctgcccaagccagcattggcaacccgctcaggtccccttccacactgtggaagctttgttcttttgctctttgcgataaatcttgctactgctcactctttgggtccacgctgcttttatgagctgtaacactcaccgcaaagatctgcagcttcactcctgagcccagcgagaccacgagcccaccgggaggaatgaacaactccagacgcgccaccttaagagctgtaacactcaccgcgagggtccgcggcttcactcttgaagtcagtgagaccaagaacccaccaattccggacacaatagaaagtggctaataataggtcttaacatgagatgtgcaaggcctacatggagaaaattataaaattttactgaaagatagtaaaaacctaaataaatggaaatatataccatgttcatggaaagacttggtatcttattgtcttaaagttgtcaattctcttcaaattgattaatagatttaaagcaattccaaccaaaatatcaataaagtttttaatttaaatacgtttcagcaatgctgtttctaaaatatatatggaagtggctgagccactagcccatgcctgtaatccaagtattttgggaggctgagacaggatcacttgaggccaggagttcaagaccagcccagaaacatagtgaaaccttgtctctacaaaaaataaaaaaattcgctgggcatggtggcacacacctagagtcccagctacatgggaggctgaggcaggaggattgcttgagcccaggaggtcaaggctgtagtgagccaagattgcaccattgcattccagcttgagcaacagaatgagaccctgtcactagaaaataaaataaaatattggccaggcatggtggctcacgcctgtaattccagcactttgggaggctggagtggatggatcatactgcgattgtgccattgcactccagcctgggcaagagagtgagactccatctcaaaaaataataataataaaaaataggccaggtgcagtggctcacacctgtaatcccagcactttgggaggccaaggagggcagatcatgaggtcaggagatgaagaccatcctggctaacatggtgaaaccccatctctactaaaaatacaaaaattagctgggtgcggtggcacatgcctgtaatcccagctactcgggaggctgaggcaggagaattgcttgaaccagggagtcggaggctgcagtgagccaagatcacgccactgcactccagcctggcgacagatcaagactctgtctcaaaaaataaataaataaatacaataataataataaaataaaatataaaataaaaatgcaaaggctcaaaactagttaagtaatttttaaagaaaagaattaagcaagaaaaaatttcttaccagagataaaaacttttcaataaaacaatagttgctgggtgcagtggctcatgcctataatcccagcattttgggaggccaaggggggtggatagcttgatcccagaagttcaagaccagcctgggcaacctggcaaaatctaatctctacaaaaaatacaaaaggcttgtgtctgtaaatcccaattactggggaggctgaggtgggaggatcaatcacctgagcctgggaggtcaaggcttcagtgagctgtgatggcgccactgcactccagcctgggcaatagagtgaggccctatcttaaaaaaaaaaaaaaaagacaattgttaagataatatcatattgattcagaaataggcaaattcagcaatgaaaccaaatagccaccaaacagactcacatattatagaaacttgacatatgacagtggtgacattaaaaatcactggagaaagaatggaaaaataaaattggattcacacctctcaccttacataaaaagcaattccaaattatatgtaattccaattccaattatatgtaaagataaatgttttagtaatcagaagaaaatataggagattatatttataattgtggattagggaagaatgtcttctgtttttttgtttgtttgtttgtttgttttcagacaaggactcactctgccactcaggctggagagcagtagtatgatcacggctcacttcagccttgacttcccaggctcaagagatcctcccacttcagcatcccaagtagctgggaccagaggtgtgagccaccattcctggctaattaaaaaaaaatttttttttgtagagacaaggtcttgctctgttacccaggttggtctcaagctttggagctcaagtgatcctcccaccttggcctcccaaagtattgggattacaggcgtgagccactgcacctggatggatttttaaatttttttatttttttgagttgaagtctcactctgttgcttaggctggattgcagtggtgctatcacagctcactgcaaattcaaactcctaggctcaagcaaacctctcacctctgcctcccaagtagctggcactacaggcacatagtagctgccactgtacttggctaatttaaaaaatttcttgtagagatggcatcatgctatttttcccagacttgtctagaactcctcgcttcaagtgatcctcctaccttggcctcccaaattgttgggattataggtatgtaatcccaacacctggcaaatccactgcacttggctgaatttctgaaataagacagaaaaggcattatgtaaaaaagacaaggttgatacattttaacacattaaaatcaagaattctgttcaaagacatctcaaagtaaagaagacaagccataattgggagaagacacttatttatataataaataattgaaagaagattagtatctagaatataaaaagaactcttacaaatctacttggaaaaatttttaagccaaaaacagtaggtaaaaggcacaacaaacaattcacaaaaaactcatggccaacaaacacatgaaaatatgaacagtaatcaggaaaatgcaaattaagaccacagtaaaatatacttttatacctacctgattcccaaataataagatgtttggtaataacacatgtcagtaaggatgtaggtcagctgaaagtctttaaatattgctggagggagcatacattaattgaaccactttgtactactagatctatttgtaaagttgaacattcgtatagcctctgatctagctgttccacttatataagtgccaagacatacacaggactatttatagtttatgttcacccacccccctaaaaagattggaaacaacccaaatatctgttgaaaaaaatgaatacataaattatgctacagtcacatgaaatattagtgcaaataagagaactacaagttcttaccagtacaaattcaccagtgcaaataagagaataacaagtacatgtaacaacatggataaattttatgaatgtcatattgagcagaaaaaagtgaaatataccacatatttcctaaattgtaaaataacacggaacataaattttaccatcttaacctttttaagtgtacagtttagtgaaactaaactggcatgaagtacattcacattgttgtgaaatataaatgcacaaccaggccgggtgcagtggctcacgcctgtaatcccagcactttgggaggccgaggcaggcggatcacgaggtcagatagagaccatcctggctaacatggtgaaaccccgtctctactaaaaatacaaaaaaattagccgggcgtggtggcaggcacctgtagtcccagctactggggaggctgaggcaggagaatggcgtgaacctgggaggcggagcttgcagtgagctgagatcgtgccactgcactccagcctgggtgacagagtgagaccctgtctcaaaaaataaataaataaataaataaataaatgcacaaccattatccaccatctatctctagaactcttctcaacttgcaaaactaaaactctgtagccattaaacagcaactctctccctcccctcagaccctggcaatcacagttctactttctttctttcctttatcttttttgagacagggtcttgccctgctgcccaagctggggtgcagtggcaggatcatagctcactgcaggatcatacatagctcactgcagcctcgacctcccaggctcaagagatcctcccccctcagcctcccaagtagttgggactacagacatgcattaccacacctagctaatttttaaattttttgtacagctgggggtcttgatatgttgccagggctggtttcaactcttgggctcaagccatcctcccaccttgtcctcccaaagtgctgggattcgggtgtgagctactgtgcctggccaacacagctttgctttctatctctattaattcgaatattttagtttcaaagtgagggattggttcacattcctcaacctgtttgtcgtcatgctttataacttgcatacacacacatataaattctttagtatatataaaatactatataccttgttttttttgttgctgttgttgttgtttgtttttgagacacagtcttgctctgtcacccaggctggagtgcagtgacacaatctcagctcactgcaacctccacctcccaggttcaagctattctcctgcctcagcctccctagtagctgggactacagacatatgccaccaccccccactaatttttgtattttcagtagagacagggtttacccacgttggccaggctggtcccaaactcctgactttcaggtgatctgcccaccttggcctccccaagtgctgggattacaggcatgagccactatgcctggcctatataccttattttcttaatgacttgatatatgaaaaaataacgacaatatccaaaattggctataatatggtaaatgctagccagcatgtaaattgatacaattttaaagacatttaaaaattaacacacaattagccaggcatggtggtgtgtgcctgtagtcccagctactcaaaaggctgaggtgggaggattatttgagccaggggaggttgaggctgcagtgagcagtgagcatgccactgcactccagcctgggcaacagtgtgagaccctgtctcaaaataaacaaacaaatcaataaataaaaactaaaacacagcaaaattgacaaatattttatggctttttagagcaactgtattttcaacttcaatttctgatgctcattgctaatacatagaaatatagtttttgtatccttgctaaacttatgttctaggaggttttgtttttgttgctgttgactctgggattttctgtgtacactatcatgtcttctgtgaacagggacagtttctttccattctgtatgctttttctttttcttgccttattgcaagggctaggacttcacgtataatttaaataggagtggtgaaagtagacatccttgccttgtcctgatcttagggagaaagcaatcttttactgtgaagtatgatttttaggtgtaggattttgtagataccctttatcgagttcaggaagttcccttttgttctagttttctgagagtttgtaccatgaatattgaattttgtcaaatgtttcttcctgcatcaattgacatgatcatgtggttttacttctcagattgttaatatggcatattacattgatttttaagtgtttaatcagctttgcattccaggtttatgtttcactttgtaattacatattattctttttttatgtattgcaggatttgatgtgctaataatttgttgcaatttttgcttctatgttcatgagagatattaatctgtaattttcttttctttgtactacctttggctaactttggtattgacataatctttttggagggcaatttgttaattgtaacaaaagtctaaaatgtgctcgcctatggattccactttgaagaatttatcttaaggaaatagagatttctattacacacatactttgggttcaggtagacctggatttaagtatgaacccaatcctttattaactgcttaaattctgtgggtctgtttcccaatctgtaaaatggggataagaggacctatttcagaccttattaactgagacaattcacacacagtgcccaagaaccagtaagctttaagtaaatggtaactcttggtattatgttatactctctggcctctctgtagcaggacaattctgtccaaatcagaggatgtcatctttgcttctgtattggctcccactttgaatctccttaatcttcctcatctctaatttcgccgtcttctgttagacgtgttaggccttgagaatacaaaagcaacaaaagatatcgtccttgttttcagagacatgaacctcctagacacaggcgcaaacggtaccaagcaatgtaacagaacaaaagtgagacgtctgcccaaggggcagccgaccctggacatgcattcagagcgtcagtgtcagctgacactcgggagtgacagctcgggcagtcaccgagctgggaagacaggagggagtgccgcaacttcttcagtgtagccttaagtcgcggtgaggggcgcgtagagacttgctgctcccatagcaacgggaccagccaccctctacaggcctgacgggttacttccgttcaccgtcggctgagccaagaaaggccgcttccgatcctccagcccccgaggcgcgggggcgcgcggacgcccggttataactgaacaacccgagccccacgtctctgattggctcaggcagaggaagggggcgggagatcggcaacgaagggcgtggccggcttccactcaaacttgaggtttccccccatcccctcacagcggaagccgacctcgcccgccccggaagtgcaaactgtgtggtctggcaggtgtggattccgccggtgaaggctgaaggcagctaccttaaagatgccgggatccgcagcgaagggctcggagttgtcagagaggatcgagagcttcgtggagaccctgaagcggggtggtgggccgcgcagctccgaggaaatggctcgggagaccctagggttgctgcgccagatcatcacggaccaccgctggagcaacgcgggtgaggccggcctgcctccgccggcgaacctggcccctgtctgttcccgatcccagggctgaaaatttcccaggcctcacttcgcgttggctcctcttatcctctctcttttggactgtaggggagctgatggagctgatccgcagagagggcaggaggatgacggccgctcagccctccgagaccaccgtgggcaacatggtgcggagagtgctcaagattatccgggaggagtatggcaggtcaggctcacgtcctgggctcctggttggatccagtgacactttttgcacgggcccctctacctgctcggagactttattggagctgaacagcccttgttacctgcctgaccactcctccccacctctctctttgggtcttgttgcctctatagactccatggacgcagcgacgagagtgatcagcaggagtccctgcacaaactgttgacatccggaggcctaaacgaggatttcagcttccattatgcccaactccagtccaacatcattgaggcgattaatgagctgctagtggagctgggtaagaggcctgatcgctgggaaaatgggactggtcacaggcaaataagggaacagaagcctctgaaggttgttcattagcagagatgggagattagctgtcttctggttctcagaggtttgtcctccttcctgattaggaaatgttgcaacaggtgacaggaccaaagtaatcctctctacttttccttacagaccaacccttgatagactacagatctgtggagtggaacagactctattaggacagagttttattttcattgtaaagaaacaaaatgaactccctagagagccaaggtcgatagacctccttcactatctgaatttttatacacacgtacacgtataccatttctatcccccttgtcattgcggtccaagtgacttgcagatattcattgtaatcagaggatgaagaagctgcttcctaattgctcccccattttttcttctctggccagtctctctcatgtagaagtgttgtggccaccttttggaggaagacttcttttaggccgaagctctctttaccctattctcagcactttaggatttcccagattgccattccttggctgaatctactgtcttcaaaatcagttgtaaggagctctgtagtgacagaggtggttcataggtaggggtacttctggaagagggcaggcagaaaatcccagaggagtggggcttttaagaaattgtgacatagctgggcatggtggctcacacctgtaatcccacaactttgggaggccaaggtgagtggattgcttgagaccaggagttcaaaaccagcctgggcaacatagtgggaccctgtctctattaaaaaaaaagaaattgtgacatttcactttaagcacattaaccctgtggtaccagggtctgctaggtgggcagtgcatgtgaagggcagacatctttttccgtatacgcgtaatgtgtgtttgtgatatagcaatttcatatatatatatatatatatatattttttttttttttttttttttttttttttttttttgcaaaaccgttcttacagaagggacaatggagaacattgcagcccaggctctggagcacattcactccaatgaggtgatcatgaccattggcttctcccgaacagtagaggccttcctcaaagaggctgcccgaaagaggaaattccatgtcattgtagcagagtgtgctcctttctgccaggtaaggagactgctggagttgctactaagaaaaatgaaaaatgaagaagaaataaacgagagatgggtagggccattccaaccttgaattgataagcaagactttgagacactgagaagatcaagtaaaacattaagtgaattttcaaggtgttcgtcctgtgaacattcataaatagtggtttaagaaagttggggccaggagcgatggctcatgcctgtaatcccagcactttgggaggctgggcgggtggattacctgaggtcaggagttcgagagcagcctggccaacatgacaaaaccccgtctccactaaaaatacaaaaattagctgggcgtggtggcacatgcctgtaatcccagctactctggagggtgaggcaggagaattgcttgaacctggaaggcagaggttgcaatgagccaagatagcgccactgcactccagcctggacgacagagcaagactctgtctcaaaaaaaaaaaaaaagatggcgagctgctaggttcaaggaaagataacttgattcttttaggaatcaaagcagggtaaattaccttggggatgactaatgcttggtctgacctcacttgatcctaagtaaataataggtctcaaaaaggaaatatgtaaggatgcaggttgttttaaaataatgagccaggagctatcttgtcagcaatcgtgattatattatacatgcatgttgtatttccagttttatggctgctctggtgctgctgtggagcattagacatttattagcttcccctgggcttccctacagcttaccagagctatgagagtctgaaaaatcagttgtccgaaaaatgagttatctattggaaattatgtgctggatatgcccatatcacacaattccccagatccagttacatttgagagcacttttcactatttctcactctttctcttagaatcagcctttccctcccattgcagggtcatgaaatggctgtgaatttgtccaaagcaggtattgagacaactgtcatgactgatgctgccatttttgccgttatgtcaagagtcaacaaggtgggtatatctggagttatgttgaattcatgaagattatgtttctaaaatattgatttttatctcctcctgtaatatccacggtgagagaataaagtttctagcacctttcaaagtacatacttaggcctttttaatctgttaactgaatttcttttcccttttttctgcatcattgttcctctcttggagtagcctctaaatttggttgaagcattgaaaagaatgaagtattaaatagaactaaggcaagagtgtcagtttctagggattggctacagggctcctgccttatgctcaaagagcttggcagttgtggatagtgaatgaaaaagattcctggcttctcagaaggtatggcatctcaatttccagaaaatatgggactgagagcagtaggttttgcagtttcttgtcccattttacattcattctttccttggaaacctacttttaagctagaacttgtattgagccagggatcccttcacctctaccagtctgtgacccctcacgataccaattctgaggtctaagcatttagctttttgtggccagtggcccttttagggctccacccccaggatggctcacattttttgtcttgtcccaaaggtgatcattggcacgaagaccatcctggccaatggggccctgagagctgtgacaggaactcacactctggcactggcagcaaaacaccattccaccccactcatcgtctgtgcacctatgttcaaactttctccacaggtaagtgtgtctgtctctagctagaagccagcagaaaagaaggaagccaaagggtaggcttgaactctgggacttcaaccacctcactccagggcctccatttatctgcatttactcaatggattacacccagtggaggctggaaagaaccacagaagtcttgattcagtaaaacagttgagagttctcagctgtcaactttaggaagtcaagattgtaaggacaatatgtagttgggaaaggtcctttgcttacgattgccaccactccctgtcgcctgaccatttctgaaaatgccaagcaggttgaaagtaggatcatagaatcagttttgttattgttgcagggcctgtcctttgtaacctgaatacaagcaaggactaagtgaagagccatttcatcagtgatagaagctatttgctttgaaaacatcaacctatttataggtctctattttttaaattgaggtgaaattcacataacatacaattaaccattttaaagtatacaatttagtgatatctagtacattcacagcattgtacaaccaccactctctagtttcaaaactttttctccactgtagaaaaacaccctgtacccattaagtaatctctccctatttgtccttctccccatctcctccaatctgctcctgtctctatggatttgcccattttgtataaaaggaatcatataatatgtgacatgttgtgcctgacttttttcacttagcatgatgttttcaaagttcatccatgttgtaatgtcagaatttcctttcgaggctgaataatattccattatatgaacataccacaatttattaatccattcatctgtttatgggcatttgggttggttccagcttttggcttttgtgaataatgctgctataagcatctgtgtataagttttctgtgtggacatatgttttcatctctagggtacatacctaggagtggaattgctgggtctctagtttttataaattttttcctttttagttccccaatgaagaagactcatttcataagtttgtggctcctgaagaagtcctgccattcacagaaggtacagaagctgtgtgtgcatgcgtgcatgtgttgtgtgtattcggggtttgtgtgtgcatgtgttttggtctttttgttgttttgttggtcagtagaactgaatgctgtcaagttgtgttttttatcatacttcttgtggggactgttttctttagaagctcaaagtgcttgaggacctgaccaagtccatgttaatttgttctgagacaaatatattttagatttgttggggctattgtgggttggatcatttagcattgtctgggtttggctttgcatgctgtttgagatcaaccagttgggaaaatgtacctgttttcctgctataaggagtcattttggtgaattgactcccaaaggaagcaggttgtgaaatgttcctccttagaaaactcacctgtagcctggatagtctcatgtcttggggttcttttctctggcttcttctgaaggcagcagctcagctcattacgcgtgcagcctcatcagcaagggtggccttacacaccatctgagagcaacgcatagtagttggttggggtcctagttcctcttggaagttgattgacttcatccctttatttaaataaacattcaatcttcaagaaatagttattgagcacctacaatgtatccagcactcttctaggcactgaagataaaacaatgaatgaaaaagataaggccctgttcccacacattctattgtggaagacagatgagaaagtatcaggtcatgggatgcctgaggacaagcaaggctgatgtggtagcaagtggctaggggcctgagattgaggaagggtcttaatgagatgacatttcagctgagtcctgaatgaacagagtccaccatatgaagatcatagttttctatgagctggtgcaggggcttagccagttagaaaaggatggccatacatggctagacagtaatgagcaagggggagagtggtccaaattgtaattcatgtggtgtgtcagggagggcccagatcttaaacttcaatcctgagtttgaattttattctgagggctgtgcagaggcatgggagagttgtaagcagggattgtcatgatctgaagtcatctcttctggtttgcatttttccatagcttcccgtccttggggagctaatatgcctgcattctcgagcctggaatctatatgctacttaattatgagagagggagcctcagttttacctttagcatgtgtgcttgcctttcaggggacattctggagaaggtcagcgtgcattgccctgtgtttgactacgttcccccagagctcattaccctctttatctccaacattggtgggaatgcaccttcctacatctaccgcctgatgagtgaactctaccatcctgatgatcatgttttatgaccgaccacacgtgtcctaagcagattgcttaggcagatacagaatgaagaggagacttgagtgttgctgctgaagcacatccttgcaatgtgggagtgcacaggagtccacctaaaaaaaaaatccttgatactgttgcctgcctttttagtcaccccgtaacaagggcacacatccaggactgtgtcttgcctttcagatcttaacagagcagcagggcttaacttgttgattttggagcctcttagtgacctggttgcgtctgtgtcaggaacttaaactttctggttcagtagtgtgttaaacataacactgaataccttactgggatacagatttttgctcagaaatggctatgacactttttctaggctctaccaataaaagccacttgaaggttccatagttggtttatttattgtcctactctgacagaactgcttgaaacagcagcagcagagccttttttgtgtttgcatagagggctgtagttagcgggaaaagtgtacaacatggtagtactggccagatgcagtggctcccacttgtaatcctggactttgggaggctgaggtgggaggcttgtttgaggcttgtttgaggcctggagtttgagattagcctggcaacatagcaagatcctgtctctacaaaaaaatattttaaaaaattagccagacatggtggcacatgcctgtggcctcgctatgctggaggctgaggtgggaggatcacttgagcccatgagttcaaggcttcagtgagctatcattgtaccactgcactcctgcctggatgatagagcaagactctgtctctaaaaaaataacaagtacaaatgaaagtatagtttcctttacaattcactgctcctggccccaaagtttgttcatagtctaaaacagtagttccaaaacctcgctgatcatcagaatcacctgagagtgattccgatcactcactcacacagtcttgggtttcatctcagtcctactgcatctgatctcagggttactacctgggaatctgtttaaagcttcccagaaaaggatagtctcatgtagtgtttataggactataaattggtacagccttttagagggcaatttggaagctgtatttctagaattatttgtacaagcaaaaagatttatacagagtgttcagtgtagtagttgtaatgtcatagcctaagtgtccagcaataggagaaaggttaagtattgacagttacaccgtggaacattatacatggcaatagaagtttcaaaaggatggctggaggggcagtgtctggattgaaggcatttgggctggttcactgcatttaatgtgaatttgttaccaatatttaaaaatctggagattgcacatttcaaaaattcagatttcttgcttttcttgaaaactcaaatttggcaactctgggccaacatttccaaatggcagtagttagtttgtggttgggtaacatctgatgccattggatggaacatctccagttttctgcagttcctactggatccatttaactcatttatgttatctgcctaacccctgtaggcatttgagttgtgatcctggtgttaaaagaatgggacagatttgcaaggaagtccatttgatactctgttagttaaaaacaagctggggaaaaaaaacacaacaagctgcagagcaatatgcataatacggactcatttccataaaacaacactggctgggcgcaatggctcacgcctataatcccagcactttgggaggctgaggagggcagatcacttgaggtcaggagtttgagaccagcctggtcaaaatggcgaaactaaaatactataataaaatttttagttccactaaaaatacaaaaattagccaggtgtggttgtgggtacctgtagtcccagctactcgggaggctgaacttgggaagtagaggttgcagtgagcagtgccattgggccactgcactttagcctgggcaacagtgggtgagactctgtctcacaaaaacaaaacaaaattatatgtacacgcatagggaaacagtatagaagtataataccaagcacagcaagcagagggacatcctctaattttgttgacatgtttatgcttacatattgtttccggtttttaacctaaaaagtctcccaggtgatccagattttctgccatgtttaggaactagtggtccaaagcagggcctcttgtgcagtgtctgtgtgggtggagggagcactaagaatctgcatgtttaacaaataccctgtgggctttgaacaggtgatttgaaaccacattttggttaacactgggcagaggtaggttctgagggaaaggtctctattctttgatatctctttgagagcgatctttgccttaggtcttccagagaggggaaaaaagtaagacctcagaaagtcggcattttacactgacctaaaagctgtatgactcagaagagcctgactcactcaggctcagtctttctattatttcttaaagcatctaagaccccacgctttctcagtgaagtggcttgtagctaccaattacgagcaattgtctcctccaaaggcaccaattctaacagcaattcacttgggtacaattgtgtggtttggagtaagagcagcagtgaggcaaggaacttaaatctgttcctggctccaaaaatgctttatgatacttgtcctttgtccatcttagtctctgtgtctaaaattagcaccaacatccttcccaggcatgactgagttggatgaaggttataagggtagaagctctctttctggtcagctcttacagtgcctagaacagaactgcaggaatgcatactttttagaatctttatgaccccaattaagtaaaccctattaaggctcatcttcctatttcccctctctccgtttccctatttgaggaggggtaagtatcagaaagagagaacctgaactgaacaggaggaaacagaagttccacatcaactcactacctgtcagccttggtatcaggggtgcccacctcccacccctgccttgctggcggaaccgagaaactcggaaaaaaacaaacaaaaaaacaactgttgtagcttggagagaattaatagaactaggattccatggatgtgaaagtcttcctgaatatgctaaataaaccaagttagataacagtgcagtttgtaaagacacttttttcccacggtttctatcttccagtttgggcagagggcaggaaaggcacaattcttggaacttgaataaggaacagaaattcctaatttagcctcagaagagacatctctgaaaaatactctaccaggaaaaactgaagtgtaaaatgatacctcaaagaaatcaatgctggaacccataggatcatatgtttcatggatgtgcttcaaaactatttctcaaagcaatctgttgcatcagtctttgggctaatgaaggctgccagtcacagttccatcatggaatgactggcatactctgtaatgatctataatactacaactacatcagaactgctctgccatacagatagtaccagatggtgatgtgattattgtaaaggcctcacactatccacctgtccttgcaaaaactcccttagcagacatgcacctagttgacatgaaagaacaattttgaaatgtgatttggaagtgttttatatctggcctactttgctttgaattattctttcatttgccaaagagctcttgcaaggtactgcacaatggctaggcaattattattattaatagtaaaaactgcaattgcttttgcaccaacttaaagagctaaagtctaagcttccagtctcccagcatccctcacacgatggagggcagcacttgagtctaatcatgcttgagatggtgattgcctgatatgtatattaaatactatgctgaagagacggatcctttcaatagtgtttttttcaagcatgttacatttagaattaagacctgcctagaaaataagctacatagtgctgaagaaacaaaaacttgacaagattcctaagttatcatttatatgtaatattcttcctacaacactgggtttggaaggataataaatacataaaaataaaattctgcagttaactaatatgaaaaagaggtaatgcagtgttgaataatgagaaactgctaattgcggtagctaactccaagccactttttttggactgctcggcccatcatggggcattccttactttggaagtagataagagcaagttggaaggccagagtcaggcaaggctggccaaatcccacttctgcaggctgctgcttgaatcatcctggcctgatagattcccacatgcagcacactgcgattcccacacgcttggatccggttgcctggactatatccgatgcttctgggtaagactgagtgctctgtaactaatgggcctggggtgaaaatgatccaagggttggaaacatcctaagccatgtgataacctcttttttttctttatatcccccacaagttctgatacaatacatttagaaaggaactcactgaagatttgctgaatgaagagagggatggaaggaaaaaggaaggaaggaagggtttatttgatgcagattcttcagcattttgttttcacagactcccttcttttcccctcttctggacccacctttttgccatctcaccgttgatgagcagcttcagcttagagggtaaagacaggcatgatcgcgactggccagcacactggccggttctctctgttagcagacttttgccaagggtttggatggaatgggtggctcttcaggtggaaaacaggtcgtgggggtcaggttttgggtgcctgaaactgctcttccttcactccactgtgccatgactggctcccacccgaagcttcagctgagctggcttgtcagggctcgctaggaactgctgagctgcatctgtccttacttggcgtggcttcctcagccccctccacatctcaagaacgtggccttgggcccctttctgctctgaccattttgcttgcctgggttttttcactgtctgccatgcgcagatcccagctgttcatttgtacctgacctctgactgctagaacctctccattcttacatctcatgtagttccaggtccccagccaggttctggatgttacccaagccccctccccattctccagcttcattctagcctacactttatgctttgccttaagcttttctgatactagctcctattaccatctctagtcttaattctgatagtgggactgctagctcctcttctttcaataataaagggctagctgtaactagctgtgactctgtgatacctaacgccagaagaagctactatattctatcattagtttccttgtctttctcagtgactaaagctaagcctcttgaaggtagagacagccataggaaccttcacttctcaatgaagtgttgatgaatgttatagaaaaaggaactctcaagaatggctgcattttacatctcatctctcaagttttactctgaagttactaaagccttcagcgaccagaatctaataaaggtgaatcaccaagtttataaatgaatgaattcctaataaattaaaaatataagggatagcatatgggtaataatgggaaggactgtgcagtttgaagtcactcagacctgggtctgaattctggctcttacagctaagccttcagcaaaccagttaacagctccgagcttcgaagttttattatacaaaggtgacaactaggttcctaagaggaaccttcgtttcccactttgtaaaatggtgataaagctaccaccttacctcatggactgtcaagaaactaaactaagataaagtatgagaaaaattattttgtaaaccttaaagcacaatataggtattaatgattactattataaattacatgtatctttgttcttatggcatctgagttaaaaacaacataaaaccctaacaggcgataaaggtaatctattagatgtttttccctaataggttgtttttatgctgaggcatgcccccacacttataaattatgaaaacagaataattatctcttacattgcttgagtcaggctagtcaggaaggccggttacataatttatggaggactttttctaatcctctgctactctcaagaaaacagtagttgggattacatatagcaaaaccttctgaaatcataagaggcactgagacactttttaaaatccctcaaattggtctggccttaaaagatttttacaactcccaggacagttggcctccatgcagccctcaagcagggaggcggaggccctgaggccacactgccacactgggcctggaggcagagcccctgacagcctggcaaatcctctgaaaactctctcctttctaaggtcatgtcttcccatctataaaacatccgtttatatgtatttagaagaataaaagccattttttagacagtagggcctgttcttcaggattccaattacgtaaatctacaaggatccccttgaaaacaagtgaagttttctctgaaccttctctggggcagacgctaatgaatgcaatactttcattgctcctgtaagattcacttcaaggctgctggcaaaggaacttttcttccatgagcacgaattggtttcctgtattaaaaaatgaggaaaatcattcaattgatataaaagccactttgagcaggctggtcaggaaatacaaaagtagaaattctcattgcatcatcttactaattgtatagcaccccagttgcaataaacattaccagctggctttttgcattttttttctactatgcaattttagtctgttgagtcctattaaccacaaatcatgtgaaaaggtgcgggaaaaatagattgagaatggcataacaagcatttgcagaaatatcagtcctggtcccaagtgatattataagggcaatagataggcataatgtaataacaccaagataccgtttgaaagggacccaaagaacccttgtctcctgaaagaaaaagtgtaaagatatttggttaggttgaacgtatgtatgctgtgttttgatatgacaattgctttcacataaagagatactttataaagtaccaaaaaaaatcatattttaaaaaacaagctcatagtattttcaccattttactggtttgggatattgaacatcagtctctgagtttttaaagaaaacataacaaaaaacccggaacaggactttaaattttctctgttctatccttgtcctttttatcaatagtttttatccctaaaataactaaaggcctgatgaaagaccctagagaatgttttcactgtagtagagaaactctttaagtctgagatgtagcacatgaagcagcagcatagggaagtgaagaagactgaagggaaaagaggggaccagtgcagaaaccctgggggcagcctgggaaggcagactaccccttggacttgagcatcagctgaattagatacacgcaaatgtgaagcttgaaaaaaaactgtacaaaaacaaaaatcacacccttcaaataacaaaccaagcaaccaatcaaactgtcattaaattttatcattaaataagtagcaaaaggtagatactatatagcaaccttctgtgcccatggatgcaaatgaatgaattgtctttaggcttgaatttcatctggctactcaactaggggaatcatctgctcaagaaagactgatacagagagccctgctgtctaagctgctcagggacactgggctgattcagtcagggccgtgctggtacctgctgctgctgctctctgctcagaggcatacagtgaacatccctttgttccttttagaccagtgattctgttctcatggtggctcacagggaggcatggattgctgcaggctctgccttgtatcacactctgcttttccaaagagacgccaggcctgggccattttgcgaagtttagtgaggttgggtttaatctatgggaagaaagaataacttcaattagcaatatgaaaaggtaggtagcatacaggctgggcgaggtgactcacacctgtaatcccagcactctgggaggccaaggcaggcggatcacaaggtcaggagtttgagaccagcctggccaatacggtgaaaccctgtctctactaaaaatacaaaaaaaaattagccgggtgtggtggcgcatgcctataatcccagctactcaggaggctgaggcaggagaattgattgaacctgggaggcggaggttgtggtgagccaagatcatgccactgcactccagcctgggcgacagagtgagactccgtctcaaaaaaaaaaaattgaaaatgtaggtagcatacaaatatttccaaagtctggctgttataatctgtttagatttctaacttctggattcaatagagattacagattgttttaaggatccaaggggactcagaactttaagtctagattcccagctctcagcaatggagaaaaactttcttcatatttttctttgtgaaacaaagaggttttaatgaagtaaaatcagctagttgagtcagacaacattagtacctgaaaactccatgcaagaaaagattttatatcccttagcagggaaaggttagcaaaagaaaagattttgggcagggcgcagtggctcatgcctataatcccagcactttgggaggccaaggtggacagttcacctgaggtcgggagttcgagaccagcctgaccaacatggagaaacgctgtctctactaaaaatacagaattagccgggcgtggtggcgcatgcctgtaatcccagctactcgggaggctgaggcaggagaattgcttgaacccgggaggcagaggttgcggtgagccaagatcgcaccattgcactccagcctgcgcaacaacagcaaaactccgtctcaaaaaacaaaaaaaaaggaaagattttggaaagcagcaacagggacattcctgttatgttctccatgttctccttcactgaagattataacaaggacagaagttcttcatttaagccattctgtgccttttctgcattatccacattgtagtttgcaggttgctgggtaattagggccaaagcataatgtagagatccccaagcttgggtccctgtctgatgatcctcaaaccataactcaagatccttggggatggccagctacagtcacagatcaccgtttccagcaggtactatcaagaaactggaagttgaggctctatattgccaacagtgaatttgctgtgcttctaccaactttcagtagcttcagaaagaactgcatattatgaaacctagagccagcaggcaatagatattcagggtacataagtctgtacatgtgttaagttttaaaatacaaagccattatgtaggtgacctgacagttcagtctaagttccattttggatttgagctggaaaatgaaatgggtgaggctttatgtgaaacttccaatgcagattttgcaaaactctcctattttggaaaggttaagacagattacagttgcatagtaaaagccagaaaagaaagagaagataaactttgctccctcctgctcctgttagtcattaatgtacctgtttttcctgttccaagtggtctatgtcagctaacggcagcatagaaggtctcccgtgagcacactggaatggcagctggcatgaggacagagcttcaataaggcggcaactttcctgtaagctcaggccatcattaaacttaatggcccctaaatgaaagacagaaacaagaaggttatagtgtatatagtgggaaaccaatgctgaccttgggtcactgccaaatatctggaaaaagtaacatgtttcttaggcttctttaatgaagctttaatcctgcttgaaattggtgcttataggccgggcatggtgtctcacacctgtaatcccagcactttgggaggctgaggcgggcagatcatgaggtcaggagttcaagaccagcctggccaatatggtgaaatcccgcctctactaaaaatacaaaaattagccgggtgtggtggcacgcgcctatagtcccagctacttgggaggctgaggcagaagaatcacttgaacccaggaggcgggggttgcagtgagccgagatcacgccactgcactccagcctgggcaacaaagcgagactccgttctcaaaaaaaaaaaaaaaaaaaaaaagagggaaataaattagtgcttatgaccatggatgaaactaaggcttcaggactgaccttctgtctctcagctttttcttacggagtatttgtatttctaatctctgtaggaggcattccttaacttgttaggatctggctttcagagtttttctccaagaggcaagagcagtatttttgcctactctttatgggtttgtgaagttggggttatctttctccatggatcgtccaatagcaatctctgattgtttccttacaatgttcattttatttgcttctttttttctaatttccataataatcttcctaatctaaactctcatattgttataacctgcctttatgcacaatttacccagtcaacaaatatttattaagtatatactttgtattgggagctttgtcaggcagttagtgagacagataatttccatcctcatggcgcttatggtctaataggggagacaaacatgaagcagataattatacaataatttaaatgataaatataggtgctataaaatacaggatatgaatatataataggaagaccaaacccagtttaggagcttaaggaaggctttcctggcaaagtagtattcaagctgagactttaggttaagaaagacgtggctaattgaagaaggagagaaaagtgtttcaggtagaggagaaggccagtgcagaggccccgacgctgacaaatgtttagcacacaggaagcagaagaccaaaaaagcaggctgggatgtaaagaacaaggtggagagtgatatgacgtgacactggagaggcaggcaggggccaaatcacgaagacccttgtgggccacagtaaaaaatcacatttctatcccaagagcaatgggtcatcattgacacattttagttagaagaacaacatgcttggagggatgtttcaaaaagattcctctgggtgctgagagaagagcagcttgaaagggagccagagtggatgtgaagaactaagtaagagagctcaacagtggcaaaaatgagggaggagccagacagactgaatcagacggaccgaagatacattttgaaggtggcaatgatgacatttggtgatagaggagtatgagtctgttctcacactgccatgaagaaatgaccaagactgggtcatttataaaggaaagaccatttaaatgactcacagttctgcatggctggggaggcctcagaaaacttacaattatggcggaaggtgaaggagaagcaggcaccttcctcacagggcctcacccagctccccattttctatattgtatcatattaccctgctcaagaaccctcaatggtgttcgctttggcagcacatataataaaattggagtgatacggagaagattagcatggtccgtgcacaaggatgacatgcaaattcatgaagcattccatcttcattattattattattattattattattttgagatggagtctcactctgtcacccaggctggagtgcagtggcgtgatattggctcactgcaacctctacctcctggtttcaagtgattctcctgcctcagcctcctgagtagctgggattacaggtgcccgccaccacgcctggctaatttttatgtttttagtagagatggggtttcaccatgttggccaggctggtctcgaactcctgacctcaggtgatccatccgccttggtctcccaaagtgctgggattacaggcgtaagcaaccgcgcctgggcgcattccatctttttacaaaaaccctagaagaaaacctcagaaataccattctggacgtaggccttggcaaagatttcctggtaaagactctaaaagcaactgcaataaaacgaaaattgacaagtgagacttaattaaactaaagagcttctccacagcaaaagaaactatcaacagaatagacggacaacttacagaatgggagaaaatatttgcaaactgcatccaacagaggtctaatatccagaatctatataaggaactaatatccagaatctataaggaacttaaataaattaacaagcaaaaaccaaaaaaccctattaaaaaatgggcaaaggacatgaacacacacttctcaaaagaagacatacacatggccaacaagcatataaaaaatgttcaatgtcactaatcattagagaaatgcaaatcaaaatcacagtgacataccatctcacaccagtcagaatggctggtattaaaaagttaaaaaataacagatgctggtgaggctgcaaagaaaacagaacacttatacactgctggtgggaaatataaattagttcagccactgtggaaaacagtttagagatttcttaaagaacttaaagcaaaactaccattcaacccagtaatcctattactgggaatatgcccaaagaaacagaaatcattctaccataaagacacatgcatgtgttatgctcactgcagcactatttacaatagcaaagacatggaatcaacctcaatgctcatcaatggtggattggataaagaaaatgtggtacatatacatcatggaatactatgtcgccataaaaaagaacgagatcacatcctttgcaaaaacatagagctagaggccatcatcctaagtgaattagaaaaccaaatactgcatgttcttacttaaaagtgggagccaaacattgaatacacatagaaacaaagaaggggtaacagacacctgggcctacttgagggtggagggtgggaggtgggtgaggatcagaactacctattgggtactatgctcattacctgggtgacaaaataatcggtacaccaaacccctgcgacatgcaactcacccatgttacaaagtgcacatgtaccccctgaacctaaaatgaaagttggaaagataaaaaaagaacgcttgctaattctaatgccttctgtatcaaatccaaaggttttgctgtgaccttctaggtttctgttctcttacctgcctagtttcttgatactctttgctgcttctcatataactaacttgtttctgttctgcctctctgcacaggctgtttactctccctatagtgaattcccctttccatgctatgaacccatgttccccagctcattcaaaattcatctcaaaatgcatctcctctaggagttattcctccactcatataggtcaggcagcactatagtcaaatttttgtgttgggattttgtttttgtaaaagtgatttttaaaagggtatattcagtttcttgatctaaattgtattctccaagagtcaagtagtaaatgtaccctctgcctctttcgtaatcccggcagccctgccagggctctgcatgcagaggtgtttgatcactgctatgttgaagggcttaccatggcaggcttgggatgccaacaccttctggacagtcagtggcaatgtcccttggatgcctccggtggtctggagtagctaatgcataaacacgttattaacaggaaaagaaaatggaacaacgaagccttttatgtgtggtgcttctgtgtgaaaccccaaaataaaggaaaagcttacctccagttgttctcggataaattcctgcaaagcaaaaggaaaatcggctttaatctacggttatgttttacttgccctttgatagtttacaaaatatctcaattttcttctttaaatcatgcctcctgaaagaaagagttccagcaatacagcacttgggtacaaatttatttgttgtaaggcactttgaatatgaaaaaaccaagcaactgaatagaactcttattgaacacagaatatatttagctactgagacttcctccagagatagcttctcaactaatgaggttatgtagctggtgagagtagccttgatgattcaaccaattcaaaacatcaggaaggcttctcactaaaaggctgtctgtttgtgtgtgtaatcttagccagaacaagcgtaatattacacacaaactgagaataaatacacaacaaccatcaacacaaccactgctcagtataacacttgcttaaatatcataaacataagtaaacagtcactttagttcccacgggctttttggggacaattcccttcaggtcagaaagtttattttctgaggccctttgttgagaaatttctcctcccttgcatgtctctgtccctggggtaaccttttcaatagttatatccctgtggatattaatatttacaaaagaagcttaaagaaatttaaagcagacactatttcatgctaccaatttgtttaacctctggaggtaaaaagaaaaaaacctgttgcacatttaatgatttctttataagaaaatcatttctttactcctggaaaaggctatgtgtaaatctgctcctaagattacaacatggtaccttttcttttaaaaccagactcaggaaattctcttccctccttcatctatactctagtctgccatgcctataaatgagcacagttatcaagagctaggtagtagatactatattacatataatttaaaaatcacatgctttcccaaacaaacctaaacagaaagatggtctcataagactcaatccactgacaaagcttagtgtggatggagagcaaacattcttgtgtttgtacatctgggatggtaaaacatctgtttgtaagcttagtgaaggggtgatgggtctcatctcagtccattttatattccaatggtctgtttaatgctggataatttaatatttttattttattttttatttatttatttagttagttagttacttattttgagatggagtttcactcttgttgcccaggctggagtgcaatggcacgatcttggctcaccgcaacctctgccttctgggttcaagcgattctcctgcctcagcctcctgagtagctgggattacaatcatgcaccaccacgcctggctaattttgtatctttagtagagacagggtttctccatgttggtcaggctggtctcgaactcccgacctcagatgatccgcctgcctcggcctcccaaagtgctgggattacagttgtgagccactgcacctggccgtatttatttattatttttaattttttgagacggagtctcgttgttgcccaggctggagtgccatggcgcgatctcagctcactgcagcctccacctcctcaccaggctagaagatagagctttatagaaggatgtattaatgatctttcaactgctaggattcaaatagctacctcctcaaaacaccaaaactgttccagcttcttccagaatcacacaaagtctctcctgatcagcctgacataggataatcaagattttatgaaaccagaggtttgtttccatttgaagcaaactccttaacagtagtcttttaagttccttcaggaaaagtttttcttataattttctggttacatattagggattgaattacaataaaagactctaacagatcctatcttttggatttaggacaatttggagcaggggtcttagagaaagcatgtctgtggggaggaaagagctttgctggaagcagagcaaatctttggatctgtctgatccaaaggcgattctggaaagggcaaagccaagatgacccaagagctgactgacagctgctcttcctcttgaatgtttcccccttggcctgcaaacctgcttacgtcttttttgtcttaaagcaaacaaacacctttcctcagccttgaatcccaccccacacttcccaaccacttctaacctttagctctcaccccatctctcttcttctgtgtgtagccaaagttcctgaaagagttgtctacttagcttcacttcctcctgcttcacgcactcctgactcactgcactcttatcttctgccccacctcatccccaggaaatgattccacaagacaactaatgtcctcatgacagtcaagtccagcgtttcaggctctacttcatagccgttattgaccattccctccttgcttaaaactttccttagttttggcaatattgctttttcctggttttcctcctccctctctaaccaagtattttcagccatccttagaatttcctcttttcagcagagctttccagaccttttccaaagcatatgcaccctggatgctgatgttccacaggctccactcttttctctcttccttttcactctccatattctccctggacaacctcacttcctcaaggcccttctccagcttctgatactatcaatatatatatactgttaactctcagatagatatgtacagcccagatttattttccaagtaccagatcttttaagtgtgcctatccactgggcattccacctgcaggcacattcactgtgtctaaacccaccttcacgatggaactcctaggcaggtttgttcctcctcatctgtgtcccttctctgtcaatggcaccaccatccttccagccatccatgctacaaccctcagaatcactgttgcttttgttttctcctttattcctttcacgtttgattgctcaccaagtcctcttgcttctgcctcccaaattctgtctcagatatgtcactcctctctactccctctgctactgactcagtccaatcctcatcttctcttaccttaaccactgcaataacccgtcagctgctctccctgactcaaatcttcccacataaatccatcccccaatttatctactacatctatcctctaattttagattttactattttagatattactaaagcacttcagacttctagatgaggtgggtgtggatttgcctgtgctccaaatcaagaaagctagtgataaaggagaaggaacaatcatgaaaaaagcaggacaccataaaaaaggaagagtgagatttggggaaaaaaacacaacttctggaaataaaaaatatagccattgaaataaaaaatttagtcactgaaataaaaaactcagtggataagctaaacacataattaaacagaagatgaagagatactttagttcactggaagataagtgaggagatttcacagaatgtatcacagagagaaagcaatgggaaatatggaagagagttgaagaggcatgcagagtagaaagataaggcccagtagatatctgacaaaatttccaagagacaagagagagaatgggaaagaaacgtttgaggtgataatgactgcatactttccaaactgaagaagcatagtgaatctccagaaggaaatgaaaataaatccatacaaagatacatcatagggaaattgcagaacaccaaagacaaagtgaaccatcgtaaaagcaaccagagggaaaatcagattacctacagagtaataattggattgactaaggacttcaatggctaaaacagaaagtcaggctgggtgcagtggctcacacctgtaatcccagcactttgggaggccacggcaggcagatcacctgaggtcaggagtttgagaccagcctggccaacatggtgaaaccccatctctgctaaagatacaaaaattagctgggtgtggtggtgggcacctgtaatcccagctactttgtaggcttaggcaggagaatcgcttgaacctgggaggcggaggttgcagtgagctgagatcatcccattgcactccagcctgggtaacagagtgagactctgtctcaaaaaatgaaataaaataaaataaaatagaaagtcaaaagtagtgaaatattttcaaaatgcgggggggataactggcaatgtgaaattctgtttttagctagataatcatgcaagtatgaagacaaaataaagatactttaaaagacagcttatcattcacggacttttttttttttgagacagagtttcactcttgtcacccaggctggggtgcaatggcgtgatctcagctcattgcaacttctgcctcccgggttcaagtgattctcctgcctcagcctcccgagtagctggaattacaagtacctgccaccatgcccagctaatttttgtatttttggtagagacagggtttcaccacgttggccaggctggtctcaaaactcctgacctcaggtgatctgcccgccttggcctcccaaagtgctgggattacaggcatgagccaccatgcctggcccacggactcttactaaaataacttctatttatttttatatttttgtattttttgtctcaagatctgtttgtggataaaagatcttgtaagagatttacttcagtaaaaaaaaaaaaaaacaaaaaaaaaacaaaaaacccaaaagaacacagaataagtaggatgcaagaggcaatggtgaacaaagactctggtgaacactttttttaatctaaataaagattgactataaaataaatgaccaccagggaattaaaaacaaggtggaattaaagtactagacagcaacatggaagatgggaggagggtgatgggagatgaacagtttgtaagattttggtacagttaggaagaggatagagaagtgaattacttttaaactttgataagtatgcatgctaaaagttaaggctaatctctaaaaggatataaatggaatatataacttctaaacgagtagagcaaaaaaaaaaagagaaatacagaaaactataatagaaaacaggaaaggagaggaaaaagacaataaagacaaaataaatgatatttgctataaaaaaagaaacatataagtaatcaaaataaaaagtaatagttctctctaatacctccaatgccacagcccagcagtagctttccaaacctttaccaaaacatatatgtaaagtaatcatatttggaatgcaatctaaaatggaccttactctcctgcttaaaagtttccactggctgcctataggataaaatgcaaactacttagtagaatatgctaaattattttatgatttgaccttgacaacccatctagccaactcccatccagtcaaagatccaagtataacttctgatttccccccaattttttttttttttttttgagacggagtcttactgtgtcactcaggctggagtgcagtgcagtgatcttggatcactgcaacctccaccttccgggttcaagcaattctcatgcctcagcctcccaagtagctgggattacaggcacataccatcatgcctggctaattttttaatttttagtagagacggggtctcatcatgttggccaggctggtcttgaactccagacctcaaatgatccgcccgccttggcctcccaaaatgctgggattacaggcgtgagccactgcacctggcctgatttccccaaatcttaactaccaatagcctaacgttgatcagaagcattaccaataatataaacagttgattaacacatattttgtgtgttgtatatattacacactgtattcttacaattaagtaagctagagaaaagaaaatgttggccaggcgtagtggctcatgcctgtaatcccagcactttgggaggccaaggcaggtggatcatttgaggtcaggagttcaataccagcttggccaacatggtgagaccccatctctactaaaaatacaaaaattagccggggcatggtggtgtgcgcctgtaatcccagctacttgggaggctgaggtaggagaatcgctttaacccgggaggtggaggttgcagtgagccgagattgtgccattgcactccagcctgggcatcgcaaaaaaaaaaaaaaaaagaaagaaagaaagaaagaaaaagaaaatgttaagaaaatcataagaaacagaaaatatatttattattcattaagtggaaatgaatcatcataaaggtcttcaccctcatcattttcacattgaataggctaaggaggaggaagaagaggaaaggttggtcttgctgtctcaggaatggcagaggtgaaagaaaatctgcatttaagtgtacctgtgcagttcagacccaagttatccaaggatcaactgtagatcttaatttgagccatatctattgatagttccctaaacataggatgtatctcaagtctctgatatgtattcctctgtctagaatgcccttctcccctcttctgtactcagcactttcccactattctttttttctttttttttttgagacagagtttcactcttgttgcccaggctggagtacaatggtgcaatcttggctcaatgcaacctccgcctcccaggttcaagccattctcctgcctcagcctcctgagtagctgggattataggcatgcaccaccacgcccggctaattttctatttttagtagagatggggtttttccatgcttgtcaggctggtctcgaactcccgacctcaggtgaaccacccaccacggcctcccaaagtgctggcattacaggtgtgagccaccttgcccagcctagtttcccactattctgtaagacttttctggctgtgtgcagtggctcatgcctgtagtgccgggggtttgggaagccaatgcaaggggattgcttgaggccagaagttcaggaccagcctgggcaacatagtgaggcccccatctctacaaaaaaaaaagggaaaaaattagccaggcatggtggtgcgtgtctgtagtccgagttacttgggaggctgaagcaggaagattgcttgtgcccaggagatcaaggctacagtgagctatgattgcaccactgcactccagcttgggcaacagagtgagacctggtctctcaaaagtaaaaacttttcttaagaaaacagcttttctgtgacattttcattgacttcacctccccaggcacacaagtcattctgtgtttccataacacttctgaaaaactatcttggtgcattctagactcttagttttcattacctttatcactgggaagaaagcaaaacacatacctctactagccaaagttcactgactataattctttaaatgcccttcttccttattttgagctaactcatctctgaatttctagctcctggcacacagcaggtaaataccatgaatacttgttgaagaaaagatgaattcagagaatctacagacaaaatatgaggttaccatcactcagcaatttccttaacatctgcagctgtgtcttacctccacaatactcttggtcacagtagatcttcctctccgaagttcattggcttctctttccacaaaacatagtggtacttttcccacaaggaccagagaatcactagtgtctggaaatacaaattcaaggcccagatcttccagatttttgtggtaacacctaaagagataacctcaaatgttaaaaaaaaaaagagtgctacttcatttgcacttcactactggttccaaatactacttaatagtttttcaaaagctgccacagggcttaacaaccgtattgtttttctcacacttatgtgtgggtgtttgggattttttattatcaaatttcctttttgaattacagtaacctttattgtttttctcttttccattgggaatcaatctgtgtctaagtcttgtttctaagtgtgttttcttcattgaggaactgctaacttctggctgctggcacttaagggagtctggcatgaagaaaaggtctgagagtgatttgaatcagcattaaagcagggaggtaattaacagcccaaggaattgagaagtcctgactaacgggatgtaagtaaatagatctgcctctaatataaattatgtcatagggaaaaaaagatttactggcagtatcatattcccaaacctgaaacatattgggagaaatttctttttcattttcaataatttgtgctgcctagaagaggaaaaatatcctatcttgtgactcactatatgattcgccccttccttacatcccaatgttttactttcttcccattatgattacgataatgaaaactaagagtctagaatgcaccaaagcaaagcagaatgggaccaattactgcagaaactttgctttcacaaagcatggcataaacacagactgttccaagaaatgagaagagtgttctaagccaactgctggaaagaattatcagggaaactctatcctatactcttcagctgggatacagtggaaagaataggctgggtccagtggctcacgcctgtaatcccagcactttgggaggccaaagtgggaggatcgcttgagcctaggagttcagaccagcctgggtaacatggcgaaaacccatctctaccaaaaaattacaaaaattagtccagcatggtggtgctcacctgtagttccaggtacttgggaggctgaagtgggaggactgcttgagcctggaaggtggaggttgcagtgagcagagattgtgccactgcactccagcctggacaacagagtgagaccatgtctcacaaaataaatattttaatggatgattggatgcagaaaaaaatatattttaaaaaaggaaacaaacagcctgtggagtcagacgacctgcctttgagtgcctgctccactacttaataactgctatgaccttagacaagtcttgtaacctctcttggtctcatctgagaaatggaacaatagttatgcttattcctcacagaattattgtgagaattgataccatcaacatcacattctcatggtggtactgaccataagagtctcctttgttcctctgtcactgttatctctagcggaggaattagagtagaagacagtaattttttccgaccagagccttgtgcctgttgcttctcgtaggaatctattggcagaaagatgaatgggttaagagtaggaagggaagtcttctagattcagataaaaataaagcacggccttgagataatcattctaatgcaaagcagaatgtttaatgttcagttttagattttggatttccatttttaaagtcaaactaataaatattcagcctattaacaattttggtagtatttttcaaaataagaaatataagacttgcatcttacattcagatgaacaagccaatgttcctgtagttaataaatgttgttttgatgacagaggtgaataatgtggattaccaggaacatatgtgggttgaccacacagtcttatggctccagaaggcttccctttccttgagcagggtctcccagtctctggagagaattagtactattctcaaatggtgcagggcctgtagaggtaagtttttctaacactgtttttactatatctttcccaactcttaggccgtcattttataaggaaaagtgaaaacagtagtaatatcattgccattctagtccatgaagcactccttaggtccttgcctaactctttgacattactcattggccacaggagtaaagactttcctggtattttaccacttggtgaacacactgcctcatgatgaggaaaagggtagcaaaaaaaaacatttaaaaagcatatattgctttggaaagatagatttaaaaaccagagatattggttgtctctggggagagaaactaggaggggtggggacaaggatagaaaggagactttattatattcccttttgtgcctttcagaattggatctatttgattatactgcatattcaaaagcaaactaaattttaaaatcaaaacagcatactgggccttctgagctgccactggtctctgcctgatggagtgtgggaaggcatgccaagatcaccgggcatatggaggggcagagctttgtgctggatgtcagagtaagcagcctatccttgcgtacttctgggttgttaataacatctggcaaatatgcctctgaccacataaataagttcacatctttcaattagtgaactaccacattctttcaattataacacaggccaaactgcaggactttagtttaatttttgaacatacagtacaaagtgtgctttctcacaacagttgcagttagaaaagctctttgaggtgtactgattctgctgggagtctcaaattttttctggctgcaaacagatccttaccaatgataagctgctccagacgtatacgctcatgggcagcgtgctgatccaccagcacgagcaggttcccacctagatgagcaaggattgtgaactttgattctcagagcaagacgacaaccatcatgtgtgttgaggacagagaagacttaattcaaactatctaacaacagcataagacaaaacattctgaggagtaacaattgtatcttttatttcctaaaacatgaaattatggggaaaatgatagcaaacttatcccatatgtttgaatcccagatccaattctgaaaggcacaaaagggaatttaataaagtctcctttatactcttgcccccaccccttctagtttctctctccagagattaccagtattactaatttttatcctataagttttattattttccccataatttcattttttaggaaacaaaaggtaaactaagaaactctttagttcaccagcatctcatttagaaaacatagtcagggctgggtgcagtgtctcacacctgtaatcccagcacactgggaggctgaggcgggcggatcatgaggtcaagaaatcgagatcatcctggccaacatggtgaaaccctgtctctactaaaaatacaaaaattagctgggtgtggtggcacgcgcctgtagttccagctacttgggaggctgaggcaggagaatcgcttgaacccaggaggtgtaggttgcagtgagccgagattgcaccactgcactccagcctggtgacagagtgagactccatcttaaaaaaaaaaaaaaagtcaaagtggcatttcctcaagtttgaagcttgaatatataattcttatgtttaaatactgattttgccttattaattcaactttaatatgataaaggatcgttaaacaacacattgttataatcagctaaccttggtgtacaagctacttggaaacccacaaagaatgtacttccagtgcactttagatcacaagccggagaacgttttctgaagggccagatcataaatattttaggctttttgggccacacgatttctgtcatgcctactcaacaattctttttgagccaaagcagccatagacaatatgtgaatatcgtagctgtgttccaataaaactttatttatggacactgaaatactaatttcatataattttaatgtgtcaagaaatagtcttctttttttttcccaaccattaaaaaatgtaaaaaccattcccatctccctggctgtacagaaagaggtgatgcccagattcccctcgggccatgtttatcctgccttagacttgggcttctcaaacgttcatatcacataccccctggggatcttattaaaacacagattctggctgggcctgtggctcatgcctgtaatcccaacactttgggaggctgaggagggcagatcacttgaggtcaggaattcaagatcagctgaccaacatggtgaaaccctgtctctactaaaaatacaagaattagccgggcgtggtggcaggtgcctgtagtcccagctacttgggaggctgaggcagaagaattccttgaactcgggaaggggagactgcagtgagccgagattgcaccactgcaatcccacctgggcgacagagcaagactccatctcaaaaaaaaaaaaaaaaaaaaaaaagtaaagaaaaaaagagaaatttcaacagatccattttgcttctttcaacatctgcagattttgtagttacacccatcttgagtatcattagtagagattctgatctcaaaaacaacaaagaattccagataatgaaaacttaaaaaaaaaattggccaggcgggttggctcatgcctgtaatcccagcactttgggaggccaaggcgggcggatcacctgagatcaggagttcgagaccagcctggccaacatggagaaaccccgtctctactaaaaatacaaaattagctgggcgtgggtggcgggtgcctgtaattccagctacttggaaggctgaggctggtgaaccgcttgaacccaggaggcggaggttgcagtgagctgagattgcaccattgcactccagcctgggcaacaagagtgaaacttcgtctcaaaaacaacaacaacaaaaaactattacttttctagaaatagtaaaactataggaatttgatcttcacaaattctatattcatgataattctgacagaactttaggttaatttgcctttgatctgctatgacatttactaaacaaggtaaagggaatattttgaaatacatagagaataaatgctctaaaactttagcacttgcctgcaggtactatcaagctggagccagccctccactgctgctcagggctcagccactcaggccttttcagggactttatcccatcaggcatcccttgcaaatgtgctcaagtttctcccattaaaaaaaaaaggtcctctgtcaccctcaccctctgtagtccctcttccgtgtcatgggcacatttctgagtatctccttgcagtctccattagcaccatcagcatctcgtcctgtctattctctgaaacagctctcacttgctaaaatccctaatctctactgtcacaaaatcagatgatcctcatcttacttaatgtcttggcagcgtttggcatgacatcctggttttccaacataacattcttctgttttcttcctatttctctagctgttccttcacagtctcttttgctggttcatcctcttctaccgagctcttaagtgctagaattattctagattcaagacctctcctcactcttcttttttctaggtgataacatttatatccagggtttcagtgatcacttttctgcatctgatggctcaaatttgtatctccatgtcagaacacttgtctaggccagacttgtaatatccaaccacattcttgacatctttttattttttttttttgacagagtttcgctctgtcacccaggctggagtgcagtggtgcgatcttggcgcactgcaacctccgcctcccgggttaaagcaattctctgcctcagcctcccgagtagctgggattacaggcatctgccaccatgtccagctaatttttgtatttttagtagagacagcgtttcagcatgttggccaggctggtctcaactcctgacctcaggtgatccacccacctcggcctcccaaagtgctgggattacaggcgtgagccaccgtgcctggccaccttgacatctcttctggagcatttcaaagactgaactcatgattttcatcctctctgctctgcctgcaacacgggtcctgcaacatcatcaactcagctatggaggccagaacaccagaagtcatcttttacatactttccccatatccaatccatcaccaagccctgctgactctatctcctaaatatctttccaatacattcactgctctctagtccaccctggtcccatctaaccatgtctcagatattgcaatattcttttaacagtcaatctacagttaactgggactccacccctactcctactccattctccacactgcaaccagagcaatctttttaaaatgcaaatgtgatgtgacatgtaccaccccaaaaacaacatcaaaatacaaatgataaaaaatgaaaaaaaaaaagctttcaatggtttccaacagtattgggacaaagcaaagcttgtagctggcatttaagatctgactcctacctacttctctagcctcatctccagttccccttgccctgtttccactcactgaggagaataaatcacaaattgcatggttgttccctcctttctttacttagttaactcatattcatattcagacctcattttaccaagaagcacttccctgaactccctgatgaaatcaaatctcccaatacaggttcttagagcatcttgtatctctttctccattacaggggctagaactaaaattttatgtttgtgtaattatttttttctcttgcatatatatcttttctcattattgtatccctagggcctggtacagtccctggcatacaatgggcactcaattaatacttgttgaatgagttaatatatttacaaactattattgtttcattagagcaggtcaccaagagattctgtgtaaatattgacaaacctagcagagttcattatatacactttctattattataaagggaaaacatgaaaatattattaaaaagtcaaacaatagaaaatatttaaaagaataaaagatgggctgggcgtggtggcttacacctgtaatcccagctgttagggaggcagaggtggaaggatagcttaagcccaggagttcaagacctacctgggcaatatagcgagaccccgttctccacaaaaaggaaaaaaaaaagacaaaaagagtaaaagttgaaatatctcctttgcacaccctcattttcactcccaaagtaaatactcttgatagtttaatgtgcatcctgagtatatgtatgtgtatgaacataaaactaaatgtctgtcgcccaggctggagtgtaatagcgcaatctcggctcactacatcctctgcctcccaagttcaagcgattcttgtgccttagcctcctgagtagctgggactacaggtgcacaccaccatgcccagctaatttttgtatttttagtagagacggggttttgccatgttgctcaggctggtcctgaactcctggcctcaagccatccacctgcctcacctcccaaagtgttgggattacaggtgtgagccaccgcacccagccttcataatattcttagttttagattggctttccctaatccatccaaatcattgaaactatattatataccaaaaataatcattaaaaaaaggttacaagaagaccagctggttagtcattcaggctaaactccattcttacctgcctcgccattctcttcagtcttagtgctcatcaaacaggcaataaacttgttatctacttgctggagaacctgtcagacattcaaataagtggtacaacactaaataaaaattaacaaaggcttatttgcatagaaagatacagaactgtattttatttagagttgtttgccttatcacactcctttctttgagactgggtaaggttctgatgaaccagaaaaagtcactaggaaggatgaaagaatgggcaggtggagttgatcagaagatgtaaggggagggaggcgacaggggaagacagactcccacgtctcagagtggtgtgctagcaatactttagagaaggcctgagatgttcccaacagagtgactcttgagaataggtaatgtgaccagagattgctaacatacaggctgaaataaatttttaaaatttatgtgaaagcaaggaaaacgattatggagaaactagtctatttttatttttatttatttttaatttttttttttttgagacggagtctcactttgtcacccaggctggagtgcaatggtgtgatctcggctcactgcaagctctgcctcctgggttcatgccattctcctgcctccatgccattctcctgcctcagcctcccgagtagctgggagtacaggtgcccgccaccacgcccagctaattttttgtatttttagtagagacggggtttcaccgtgttagccaggatggtctcgaactcctgacctcatgatccacccacctcggcctcccaaagtgctgggattacaggcgtgagccagcgcgcccggctgctagtctattaaagaagtaagttaaaagccactggtggctttagaccttggtggttcctctctgtctaggtacttgaggctctccaatacccccgagcctataccactgccccagggtctatttctggatcaactgcttgcctgctctggtaccaggtcaatgccaggttaggagtttacccaaatttgttagcctcctaatttgtttccgtactgaaaacaaagggaataagacagccatggtggtaaacacaaggcaaaatagaaaagcagatcagacaaagggtcccttttgtgaaatgacttctcaatatgggctttcccaaacctgtgtaggctcacacaatagaaggtaatttctaaaagggcactgttgcacacttaaggacaaggtcactaaaggactttgatttataaattattgccaaatataaagtcaatatataatcttctgcaggagaaccttgagaatccttgaaactgtcagcctgaatccataattcattccctccaaacctacttacactactaaagatatttctttctttgtaattataattaatcccttgctttttcttctgatgataaaagttctagtaagaacacacacacacacacacacacacacgtgccttgaccaaggtggtctatatcattaaataaatcaaattttagaagagttaggccatatatatatatatatatatttatgagattttgaagttaatcttttacctgcattgaatgaatcattcctttggtgaaacgatagggatacaagatgttgtgaattttaactgctaagctctcagcctggccactgcttacatcaacagcaacctagaaagactcagcaaaatataattgaaattttaatttttgtgtcagaattgttttaccaaagatatcagagtgctttaaaagcattcatttttatttagcctactagaggtgggtttaattcagggaatttatagaaattcaaaagaatcggccaggcgtggtggctcacacctgtaatctcagcactttgggaggctgaggcgggcagatcacgaggtcaggagatcgagaccatcctggctaacatggtgaaaccccatctctactaaaaaatacaaaaaattagctgggcgtggcggcaggcgcctttagtcccagctacttgggagactgaggcaggagaatggtgtgaacccgggaggcggagcttgcagtgagctgagatcacgccactgcacttcagcctgggcgacacagcaagactctgtcacaaaaaaaaaaaaaaaaaaaaaaaaaaaaaaaaaaaaattcaaaagaatttatgaataatgagtcttacataaaaatttttgcttataaacaaaattactgacaaaacaaaaaaaattgtttcacaacaacaatttgtctatgttccatgatcaagtcctcaaatgatatcttgaggaaagaactggtaaacaaatgctcatctattatacaccctgtttataacatgcacagtacattctgtgaaaatacactgaggagagaacatccatgcggggccaatgaggaactgttcctccagtagaagatgtgtggctttatctaatgataacaatttcattatcaccaccctgaatactgtgccaaagctacaagtcagggtttctgagagtggtaaacacattcactgttctcacattgattatacatgtttaatccaaaatgcctgagttcccaaatgctataaattttatttctcccctctacattaaacagtaatttccaaatacataatttggaaatatgcccagtttccaatcataattacaaattaatatagtcttgcatgcccatacccagcttaaataaaattcaaattttatttttaactaatttacttattttttaagagatggagtctcactgtgttgcccaggctatagtgtgcagtggctagtcacaggtgcaatcagcacactatatagccttgaacttctggcctcaagtgatcctcccacctcagcctcctgagtagctgagactataagtgcatgccactgtacccatcttgaaactcaaagtttaaaataacaggcaaagaaaggctgggcgtgatggctcacacctgtaatcccaggactttgggaggctgaggcgggcagatcacctgaggttgggagttagagaccagcctgaccaatatggagaaaccccatctctactaaaaatacaaaattcgctgggcgtggtggcaggtgcctgtaatcccagctgctcgagagactgaggcaggagaattgcttgaacctgggaagcgaaggttacgtgagccgagatcatgccattgcatttcagtctgggcaacaggagcaaaactccatctcaaaatttaaaaaataagaagaagaagaagaaaaaaaaaaggcaaagaaaaactgctacagacccacctctggataacgggcaaatactggattgtcccattctgagaacaaagactgaagcgattcgctactaacagtatcatccacagtatctagggcaaaagggaacaggtaaagttggcatccagaaccacagggaaaggagggaatggcatttcctgtttggtgagccatagcctcaagaccaaaggtcacgtacattgtttctatgttctacaaatgttcagtgtttgctgtatctctaaattattttgatctgttactttttaaactagagttggtgactgtatcttctggcattacagcttttctccaaactgttaaaagagatattgtggaatactgacagagaagctatggctcaaatttatagccttactgcctttaagcaaaatataccttatctatttttaaacatacacacaaaattgatgtctgtagctttttttgaagagttttgcttacataaaactacagcaacttggagtgcaagtccagcctttttaaaaataagaaacatgtcccctaatcacaagacaccacagactatgcataatcagcaaatattgacctcaagtctggaaaagtaatttctgacctaaatgcatgcgctgaattaattagttccgctgttaaacagggccgtggggaattcctgattccagtacagcacagctggcactgatcaagcttaatgcaagcctgctttgttttttgagttaggtggtacgatgtgtactgtgtgccccagcactctctgccacccttacctctgttatcctgtctcatcacagtcctctctgctcgagctctcggaaggaaaggaagaacaaggtcgcttctaaaaggttgacacctgtactgagaccctaaatataagaaagaaaaacctagaaatgtgaacttaaaatacaagtaaactctttaaaaatttaatcacataaaacctctttctgcacaaactgagtcaagacataaagcagactactaaacactagattgagaatcagaaatcctttaatgaaattatgctgtccatataggactctatattaatgcttagttccattatctattcataccagacagaatgaagacctagaataggtcactgtgattctcactggggggcaattttgcacgaggggacattggcaatgtcttgagacccttttttttttttttgagacggcgtctcgctctgtcgcccgggctggagtacagtggcgtgatctcggcttactgcaacttccgcctcccgggttcaagcaattctcctgcctcagcctcccgagtagctgggattacaggcatgcgtcaccacacccggctaatttttttgtatttttagtagacatggggtttcaccatattggccgggctggtctcaaactcttgaccttgtgatccacccgcctcggcctcccaaagtgttgggattacaggcgtgagccactgtgcccggcttgagacacttttcattgtcacaacttgagtaaagggttctacgttctactagcatctagcagataaaggccacggatgctgctaaatattctacaatgcataggacaaaccttacaacaaaaaattacccagagaagccctgtgttagacatacagcagtacttgtcagccataacttggtgcaaccttcacaaatctccaacttatgtctcttatctccaatgtatgtctctatcctaacatttgtctcattataatacaattatatttagatagctatcttccctaatagtactgtgaactcctaaaagcaaagtcagttaacctgcaacgtgacagcacctagcacagtgtggatgatcaacaaatgctgcatgaaaaagtgaacaggtagacaaatgaaaggttctcaattcaaactccagagtctagtaagatctggcccaaatgctgttcttctccatgaaggataatcagatttgagttttagaaacaatgctgaatttgacagctttagaacaggaggaaaacatgagagataaatctgttggactaaacctggagaggttaagaatgataaaattaagataatgaagtgaaataaggtttataactacaatagaaagaactgcataaaatatattttaaagaaaaaattaccaaggcttggggacttgacactactcctcaaaatcacctttatagatcctccttctgtacattaaaatgtatcttttaggctggtggctcacgcctgtaatcccagcactttgggaggccgaggcgggcagatcacctgaggttgggggtttgagaccagcctgaccaacatggagaaatcccgtctctactaaaaatacaaaattagccaggcatggtggcgcatgcctgtaattccagctactcaggaggctgaggcaggagaatcgcttgaactcagaaggcggaggttgcagtgagccgagatcgcaccatttcactttagcctgggcaacaagagcaaaactccgtctcaaaaaaaaaaaattgtcttttaacaatttatttcatgtaacacttttatgtaaagtttgacaatgtcctgatgtcatgatgtatatcagccatttccagaaaggtagcagggtactgaggagccatctgttcatggaacttctttctataccaaaaatatttttcattaggaaactatcagttaacatgaccctcaaaagttcataaaaaagtatgctaatccagaatgttaagtaggttaaagtgttttaaacgtctatattcaaaaggaagaaatatttacgttgaatatggcagctaagatttccccctttcttttagcaacagccatctcacagtataatgtaatccagttattttttggcaccatatcagaagcagttgcatttcaggaagatgaggtgtcagtgctgtagatttacctctgaaaagccttcagtgtaagtcaggacataaaaccacatagattgaaaagcacataaagtggctttaagagcaacttgatagtctcaggaacaacagtgaaagaaatgagttttctcctaatgaatactacaaaatactatgaaatactactgaagttactacagtgatttttttttcacaaggaaaaacagaaaaacactgaaaagtaaaggtttcatttaaccttaaagaaaccacagctttctgctagagatattcatcgtcaggagaaattagaaattgacttataactacatttatacatgttccattcttctgcagcattcaaaattttaaatacggatacagatgtaatgtttatcctcctagtgcaaagccaagattatagccagatggaaatcagctttatcacctcccaacatctggctctcaacacactgccaaagcaatatcactttaaatgtggaccgagaacccagagtcctagtgcaggctctaatgtagccctgtggtacgatctaaaagctatattggttgggtgcagtggctcacgcctataatcccaccactttgggaggccgaggcaggtggatcacctgaggtcaggagatcgagacaagcctggccaacacggtaaaaccctgtctctacaaaaacacaaaaaattagccgggtgtggtagcgggtgcctgtaatcccagctacttgggaggctgaggcaggaggatcccttgaacctgggaggcggaggttgtagtgagccgagatcacgccactacactccagcctgggcaacaagagtgaaactctgtctcaaataaataaatgccatattattgtcttcctgaataacagctacttgtaccataaacacatcaaggagattttaccatatgcattataataaagtacatttgaaaagtatagtcatgaaagtatatacttgacctatattttgaaaattcatggacaagtcctactttctagaaagaaaaagctcataaatgtagtactgtactaagccatagagtttactgggaaacctaggatgattacagaatcattctggcccttaacctggaagccacgcagagaaacttccagtaaaataccatgctgacactgcaggtgcctttaaagacacatttctaggaaagctgggcatttaacaggaagggaaaacaaggtaggaaagtactgtggatcttcccaactattaatagtatcatttttattaaaattggacagtctcaccccttttgttgttgctctaggtatatacccatcaccccctttcttacacatacacacacccatagacacatatacacacactgacatcctttcactgtacttctccatttaaatagtgttggacctagaggctgcgtgcgggctcacacctataatcccaacactctgggaggccgaggcaggtggatcacttgaggctaggagtttgagaccagcctggccaacatagtgaaatcctgtctctactgaaaataaaaaaatttagctgggcatggtggcatgctcttgtaatccaagctacactggaggctgaggcaggagaatcgcttgaaccaggggggcagaggttgcagtgagctgagatcgcaccactgcactccagcctgggtgacagagcaagactccgtctcaaaaaaaaaaaaaaaaaaaagtagtgttggacgtagcaaatcttcatatagcatgaaaatacaacatatgttttataagtggtcttcaaaatgttctatctgttgagataatctctttggataatgaggatcttactccttgtccagcattcccatcttcaaaagcatctcatgcacatgaatactacgtacttaccattctcaagtacaacatccacagccacagttgtcaggtctttagtacaagcagcctgaatgtcctcagttggggcaatgaatgtgctgagtccagtcattttgttgacataaaccattcttcccagggctacatcgaaatgccgctgccaatctgaacaacacgtgtttgactcttcagtttcagaacaagctcttgctttagattcctcactctgaaaacaaattccattttggtcacctgtggcatcttctaccggattcattaacattccactgggagagtcaagacttcctatctgttgttctgaggctctgataagaacatctgaatctttaccggtaactttagaattattatagggcaataccaaaggagtttctgatatcacacagttctctgttgtattgctgttagaatgtgttttactatttttattaaaggaattatcctgtgtggcagaatctgatgttgggatgacaccattctctgttttttcatgcttgttgttaaataacatacaaaaatcttgtgttaacacactgcacaacttgctgtctttcctactggaatctgaatttggaagttcattaaaacgactcatcatccccattgtttgagtttctctttcggaacccttcagtctggataatttagaggctagtgattcagatgacttctcaaggtccaaaggttttctattaaagagagataactccttcagggtcataggactttctctcaaactaagcatctgttgttctaaacaatcttcatccttggagaatggaaacttctctgagtcaaggatgtggcttgctggttgacaactactatctgaatcactatgctccatagtagtgattttacaaacatcagagttctctaagcggttcttgtccttcagcagaatgtcaggttcaacttgaagactgagattggtagtgactccattactttcctctacttctgtatccagaggattttcaaccttcccatattgcctcttaaacttctctaaagatcctagctgtgaactcaagcttagcttcttacggacgattggtttggagaaaccaattaatttatctgttttcctactatcattggaaacgtgtctataccaggggaaagagggggatgtatcagataatatgcaatctgtttgtgattttttgctaccttcctgaaaagcagaaaacattgtataagttgctgtaggttcattctctagcccataacttatattcgttctgcaattttttttgttgggcaattgaccagattctttacttaaagtgctggctaaatctttgatgtctggagtttcaactgaatgacgtgttctatttccaaatgtttcttgggcacgtgtgggaccaggtctaacataatttttaaatgaatgttctgtttcagttgatttagttttttcattttgtactacatgagttataaagccagtggaacataatttaactcgcccataactaaaaacatttcttcttccacaattgctagattctttttttttctctttctctgtctgagcactatgtactccccataatgttgttgcaaaaggcagaggctggcatcccacttcagtagcatctttaaatctctttggttgattctgaattctattatttttcaagatgttggcagccatgccattaacagtagtactttctttccatatttctagatcctgcccactctcctcaaagtgacatggtgtctgaaaagggcttaaaaacatttctaaactggttccacacggattttctaaagagctatgttccaggaaagattttttatgtttctcattttctccagcttctgatgctacaattgtctcttgttctaacatctttgattctgagcaagagctgtctttgttttgtaaagatggctctgtcattttgctatggcctggaccacctgattcataaatgtacaaaaatgcatcatttgtattttttctggtagcttctgaatccctagaactctgtgtgtttacgttttctgcagtagtttttcttttcacagcttttgactgcaaattaaacatctcataggaatctaaaatattattacatgcttcctggaaattgctcctctcatcggaagtcacacgcttctgaagagtagcatcaaataaactaaaaccattatcttcactaaattccttaatatcctcacctgataattccacaaataatttttcttgctttaaaaacattttcactccttcctgaatgcaaaacaagagagtgtcccagttctgaaattcaatcagagttttggctggctccatgcacacatcatactcacagaattggcactgcacattaattacatatatgccatagagttctggggtagaccggtgccgaagacttgaattcatttgcctactggtgggaccattctttggcttgcatataatactttctttccttaataaaaagtcaatgagtttatgtagctttgtccttaaaactagtcttttgttcacaaacaaaaactgcatattcttgttgtaatgtgcttcagagctgatatagccactaagctcaaactctttatatttaaaacttatttctcttagcttttgggactttcccaatccataaatttgacaaaatcgggaacatacgtctttggttttagggagctgaagaaccatggaaccagaaacatcatttctcaaagagaaagaaatggaagggtgcatgagtgagagagcttctattctctgcctaaccttctcaaactccagtctagggtccatgcatttcctccttacaggaagctggtaaaataggttatacactgttacagtagtcccagcgcttgctctagtcacatcagcttcacaagctttcagggcttttccactctgaaacagtttcacaaaagttttcattgtcctgtttttcttggacgaaatttccacagcactggccatgtcagcaatatttgccaaggcctctcctcggaaaccataaaaccttggattctccaagtcctgtaccgagtggcatttactggtgaaataacgatttcccactttctctacatcatcactccccatcccaaatccattgtctatcacttgaacttggaaggtttccatattcaccctgacagccacacattttgcttcagcatcaatactgttgagggcaagttcctcaacacattggcccaaggagcttatggccaaaccagaacgcaatttggcttgtacttcaactgacaagcacttgatcatggtaggtagaaagatggtgagaatgccaggcactggtttccttctctgactggaaataattgcctattggagaaaaaaaccacacacgcacataatcaaagctttagcattacacagcattatgaagaaatagcacttgaggtaaatgaaatcactcttattaaaccaaattgtgaaacaaagcaaaacaaagttataccgctgatctctaggcacagctcatgcttggtgcaatggattaacatccaaaaaaaattcataatttcataattttcaatgctcctttctaaatcccacatgtcctaaagtgaaatcataattacacttgaagttgaccagtaaacacagtattcgaaattctaaccacttcaccaaaaacagatgcctaaattaaatacagctaaggaacattagctagaaattattcatgacaaaaatgtccaagctagtttcataacatttatacattacacaataaccatgacttttagaaaaatacttataatgaattgctaagacattgtaataaggtgaagcaataggaagaaattttaagaatcaaattgtatcaaagagagattgggggcattaagaggttattattattatggttaagtatagtcacctcagggaaagaggctgggaatgggaaaagataaagcaggaaaattccttttcatataaacctttctttgccatttgattgttaaatcctgttcatgtattactctgatgtttttagaaagtcgttattattcttttttgaaacagtctcactctgtcacccaggctggagtgcaatgacacaatctcggctcactgcagcctgcacctcccgggctcaagcaatcctccagccttagcctcccgagtagctgggattacaggcgctcgccaccatgcctggctaatttttgtctcttatgtagagatggggtttcaccatgttaaccagcctggtctcgaactcctgaactcaagtgatcctcccgccttggcctcccaaagtgctgggattacaggtgtgaaccaccgcgcccggccagaaggtcattattaatattcttttggtctttacagatgggcataaactaccttggtaataataatgatggcatggggctgcctgaacttgattttaagttttcctgcaagtgaaaacacaaaaacaaaaaacaaaacaaaaaaaaccaaaccctaagattccagtgccattaaaggtctccccttcttctccatcagtgagagccacgtgggtgggcccctgcaggcggtggggccggttttccaaactcgggacaaatcagggctcttaactgcagaatttctgctgctttctaagctaatgcactaagcagccggcagcaactgaggggtaaacgtttaacaagtattccgattaatgtaaacccaatgatttcctgatgacgcctcccagcgcctgggactgacgggacgcacgggcctggatccagggcacgggggcctgggagggccgcgcgggccgagtccggggcagcgctgccttcccgccaggcccagcccctccctggccagccccgtccttgtccccaaactgggcccgcccggccgccaggccgccgggcctccggggccctcgcgcatccggctccgaaagctgcgcgcagccatcatcagggcccttctggtgttagaagagaccccggcatcatcttttcgtcgcgtgcttcccccagagtcacctggagtcccgcttaacaaattctccgacaccaaccgcctcggacgccgacgcgcgcaccttggatcttgaggctcgtgcgtgcccacgagcatgcgcttcggagggggcgcgccaggccgcgagacaccagtgcgcatgcgcaccagttgttccagccaaggatccgcatcccagggttcagtgaaccggtacctacagtctcaatccttattcccttttggcatggtgttaaagactatgtcgtaacttttacttttgtttttatttttttttcccgtgttttccctttccttttttttctcattttcacctttgctcttaactaccgtttaattcaatatatattttatgtgtttacttattgtcttctctccctagaatgtaagctatgtgaaggtaaggagtttatatattttgtttactgctgtatcccagttaccaagaacagtgcctggcctatggtaggcaccgaatgaatgaataattccagagcctgccatcttagaattatggcatttggagctggaaaaggctgagaaactgtctaactcaactcttttttttttttttttttttttgagacggagtttagctcttgttgcccaggctggaattcagtggtgcgatctcagcttactgcaacctccgcctccagggttcaagtgattctcctgcctcagcctcccgagtagctaggattacaggcatgcgccaccacactcggctaattttgtatttttagtagagacgggggtttctccatgttggtcaggctggtctcgaactccggacctcaggtgatctgcccgcctcggcctcccaaagtgttgggattacaggcgtgagccaccgcacccggcctttgctcaactcttaatttacagatgacaacaccaagactctcttcactgacttgaatctccccagtgccaccacagcttttagttataaaaataactaaaggagagcagaactctgagaatgctgtgagaataaagtgttttggaattgttaaccagtccttagtttttgctttctatctcattttcattgagaatttaaagtggaatttataacgaatttgtcagatctggtaagcatttgatacatgctagtttagtgactaaccaaacccaaccaaccagtcttctagggctgattaagcaaaatcctgataactgtttatgattattactatacctagggctgccataacaaaatacctcagactgagtagcttaagcagcagaagtctatttcctctcagttctagagactggaagtctgagatcaaggtgttggcagcaacgatttctcctgaggcctctctccttggcttgtagatggccattttcacagggtctttgatttttgcacacgtgtctatagccaatatgttctcttataagaacaccagtcagattggattagggcccaccctcacagcctcatttaatcttaatcacctctttaaaggccctatgtccaaatacagtcactttctgaggtactggggactgagactttaacatatgaatttggtgggacacagttcagcccataacataactttatgtgaattc

SEQ ID NO: 59418 - DNA, 1410 bp, Homo Sapiens
  misc_feature (4)..(4): n is a, c, g, or t
  misc_feature (27)..(27): n is a, c, g, or t
  misc_feature (29)..(29): n is a, c, g, or t
  misc_feature (44)..(44): n is a, c, g, or t
  misc_feature (57)..(57): n is a, c, g, or t
  misc_feature (68)..(68): n is a, c, g, or t
  misc_feature (98)..(98): n is a, c, g, or t
  misc_feature (118)..(118): n is a, c, g, or t
  misc_feature (146)..(146): n is a, c, g, or t
  misc_feature (157)..(157): n is a, c, g, or t
  misc_feature (177)..(177): n is a, c, g, or t
  misc_feature (1248)..(1248): n is a, c, g, or t
  misc_feature (1350)..(1350): n is a, c, g, or t
  misc_feature (1365)..(1365): n is a, c, g, or t
  misc_feature (1396)..(1396): n is a, c, g, or t
  misc_feature (1404)..(1404): n is a, c, g, or t
  misc_feature (1409)..(1409): n is a, c, g, or t
actnatccccccttttttgatccaggntntgttttaaaatggtncccttattttggnggatctgtttngtttccactctgtttactttttggcccatnaaaacgacatgctttcctgnccctgggctcccacgctgaactagttantccagttaagnaaactgacaaagagctctcntcccccgaccccagatgccaaaggaaagaggcctaggggaagaaggtggctccaacccctgctgttgtgaagaagccaggaggccaagaaagtggtgaatttcctgtttgagaaaaggcctaagaattgtggcactgggcaggacatccagcccaaaagggacctcacccgaaatggccccactatatcaggttgcagcagcaaagagccatcctctataggcggctgaaagtgtttttctgtgattaaccagttcacccagggcctggaccaccaaacagctactcagctgcttaagctagcctacaagtacagaccagagacaaagcaagaggagaagcagaggctgttggcccgggccgagaagaaagctgctgacaaaggggacatccttattaagagaccacgtgtccttcgagcaggaattaacactgtcaccaccttggtggagaaaaagaaagttcagctggtggtgattgcgcatgatgtggatcccatcaagctggttgtcttcttgcctgccctgtgtcataaaaggggagtcccttactgcattatcaaggggaaggtaagactaggacgtctagtccacaggaagacctgcaccactgtcgtcttcacacaggttaactcagaagacaaaggtgctttggctaagctgggggaagctatcaggaccaattacaatgacaggatgagatccgccatcactggggagggaaggccctgggtctcaagtctgtggctcagatcgccaagctcaaaaaggcaaagactaaagaacttgccactaaactgggttaaatgtacactgttgagttttctatacataaaaataattaaaataatacaaactttccttcaaaaaaaaagaaagaaattgacaaagaaaaacctttacaacttactggaatcttctgtctttgtattttacatgtgttgtgtgtgtggatatggaaagaactctggataattggtttaaaaatagtaagagcgtaaatccaatatttgtcagaaaagttaaaagtggtacaccttttagttccagtggaccagtatctttggggaatnaaaacagtttaaagatccttggggaaataaaagcctccaaatataacatttgaccaagttatataggccctattagattacccatatttaggccaaattggnccttggctttaaatngtccattaccacctggagccagagtcctaanaggcctgngcctng

SEQ ID NO: 59419 - DNA, 319 bp, Homo Sapiens
cagtctcagctgactcagccggcctcggtgtccgtgtccccaggacagacagccaccatcccctgctctggagataatttgggggataaatatgcttcctggtttcagcagaagccaggccagtcccctgtcctggtcatctatcaagataacaagcggccctcagggatccctgagcgattctccggctccaactctgggagcacagccactctgaccatcagcgggacccaggctatggatgaggctgactattactgtcaggcgtgggacaccaacactgcggtattcggcggagggaccaaggtgaccgtcctag

SEQ ID NO: 59420 - DNA, 2385 bp, Homo Sapiens
agaagtgtttgcatcatggaagcagcagtgcctgaaccgtggcaagcaagacatcagcgagaggctcatcagtgcctcattatttctccgttttctgtgtccagccattatgtctcccagtcttttcaaccttatgcaggagtatcctgatgaccgcacatctcggactctaactcttattgccaaggtcattcagaacctggccaactttgccaagtttggtaacaaagaggaatacatggcattcatgaatgattttttagaacatgaatggggtggaatgaagcgctttcttttggagatctctaatccagacaccatctcaaacaccccaggctttgatggttacattgatctgggccgagagctttcagttttgcattccttactgtgggaagtagtttcccaacttgataagggtgaaaattccttcctacaggcgaccgtggcaaaattggggcctctccctcgtgttcttgctgatattaccaagtcattgactaatcctacgccaatacaacagcaactgagacgcttcactgaacataactccagtccaaatgtcagtggaagcctctcctctgggctgcagaaaatatttgaagaccccactgacagtgatttgcataaactaaaatctccaagccaggacaacacagacagctacttcagagggaaaacattattgctggttcagcaagcctcctctcagagcatgacttattctgaaaaggatgaaagggaaagtagccttcctaatggtcggagcgtctccctcatggacctccaggacactcatgctgctcaagtggagcatgcatctgtcatgcttgatgtgcctatacgcttgaccggaagccagctttccataacccaggtggccagcatcaaacagctgcgggaaacccagagcactccccaaagtgcaccccaagtgagaaggcccctgcacccagccttgaaccagccaggtggccttcagcccttgtcgttccagaaccctgtctatcacctcaataacccaattccagcaatgccaaaggcctctatagattccagtttggagaacctaagcactgccagttccagaagccaaagtaacagtgaagacttcaagctcagtggacccagcaatagcagcatggaagatttcactaaacgtagcactcagagtgaggacttctccaggcggcacacggtgccagatagacacatacctcttgctttgccacgacaaaatagtactgggcaggcccagatccgaaaagtggaccagggtgggttaggtgcccgagccaaagccccaccatccctgccacacagtgcttctttacgtagcaccgggagcatgtcagtggtgtccgcagccctggtggccgaacctgtgcagaatgggagccggtcccggcagcagtcctcttcctccagagagagccctgttcccaaagttagagcaatccagagacaacagacacagcaggttcagtcacctgtggactctgccacaatgtccccagtagagaggacagcagcctgggttctgaacaatgggcagtatgaagaggatgtggaagaaactgagcaaaatctagatgaagccaagcatgctgagaagtatgaacaagaaattactaaactgaaggagcgcctgagagtttccagccggcgactggaggaatatgaacgccgcttgctggtgcaggagcagcagatgcagaagctgctgctggaatacaaggcccgactggaggacagcgaggagcggctccgaagacagcaggaagaaaaagatagccagatgaaaagcatcatcagcaggctaatggctgtggaagaggaactgaagaaggatcatgctgagatgcaagcagttattgatgcaaagcagaaaataattgatgcacaggtcataaatggagatgagattattcaaacaggaaaaacggatcgtgtccctggattcagccaacaccagactgatgagcgcgctgacccaagtgaaggagcggtacagcatgcaggtccgcaatggcatctcccccaccaaccccaccaagctttccatcacggagaatggtgaattcaaaaacagcagctgctgacgggctttgtctgtggaaggagacagaaggaaattgacccactctcctatctccagacctttacctagcccctccaggtttacagaatgttgctacttcacaatggcgatgtggtgagaaactcctgaatgaagaaaggaaccttgtctttcagggcataaggcggcgacttccaaggtcaatgcttttcccccacatctctatgtacatagggaacttagttctgggccatgtacagaaaatatcactgtaatataccaaaaggaagttaataatgtagatt

SEQ ID NO: 59421 - DNA, 401 bp, Homo Sapiens
  misc_feature (300)..(300): n is a, c, g, or t
  misc_feature (309)..(309): n is a, c, g, or t
  misc_feature (317)..(317): n is a, c, g, or t
  misc_feature (357)..(357): n is a, c, g, or t
  misc_feature (375)..(375): n is a, c, g, or t
ttttttttttgatgtttaacgtgtgttttattgttgttggcaccagaaaagctcatgttctatgttatgtcactgtacatactgtaaacaagactgcattaatattgttttcttatgatttgtttcaatgactctagattttaaaaaatacattcacaaactaccttatgtttaaacacaatgattcccttttatttcttaactgtacccaaaatcccacaataaaaaaatcatttaaagctgtgtgtttcaaacttatcacttaggaaataaaaacaaaacaaaacataaaaacaaagntcagtttgncaacatantttaaggaaggcttctgggtttaaaataccacggcggcantataaggggcgggtgggncaatcacattcggggaggtggaaatc

SEQ ID NO: 59422 - DNA, 1293 bp, Homo Sapiens
agactaagcactctccagctggtcaagaatcacatggctgttcactataataaaatcctttcagccaaagctgcagtagactgctcggttccagtaagcatgagtaccagcataaagtatgcagaccaacaacgaagagagaaactcaaaaaggaattagcacaatgtgaaaaagagttcaaattaactaaaactgcaatgcgagccaattataaaaataattccaagtcactttttaataccttacaaaagccctcaggcgaaccgcaaattgaggatgacatgttaaaagaagaaatgaatggattttcatcctttgcaaggtcactagtaccctcttcagagagactacacctaagcctacataaatccagtaaagtcatcacaaatggtcctgagaagaactccagttcctccccgtccagtgtggattatgcagcctccgggccccggaaactgagctctggagccctgtatggcagaaggcccagaagcacattcccaaattcccaccggtttcagttagtcatttcgaaagcacccagtggggatcttttggataaacattctgaactcttttctaacaaacaattgccattcactccccgcactttaaaaacagaagcaaaatctttcctgtcacagtatcgctattatacacctgccaaaagaaaaaaggattttacagatcaacggatagaagctgaaacccagactgaattaagctttaaatctgagttggggacagctgagactaaaaacatgacagattcagaaatgaacataaagcaggcagcatctaattgtgtgacatatgatgccaaagaaaaaatagctcctttacctttagaagggcatgactcaacatgggatgagattaaggatgatgctcttcagcattcctcaccaagggcaatgtgtcagtattccctgaagcccccttcaactcgtaaaatctactctgatgaagaagaactgttgtatctgagtttcattgaagatgtaacagatgaaattttgaaacttggtttattttcaaacaggtttttagaacgactgttcgagcgacatataaaacaaaataaacatttggaggaggaaaaaatgcgccacctgctgcatgtcctgaaagtagacttaggctgcacatcggaggaaaactcgttctccagtgtcaaaggcgacaataatcatgacatggagttatcaactcttaaaatcatggaaatgagcattgaggactgccctttggatgtttaatcttcattaataaatacctcaaatggccagtaa

SEQ ID NO: 59423 - DNA, 576 bp, Homo Sapiens
  misc_feature (12)..(12): n is a, c, g, or t
  misc_feature (15)..(15): n is a, c, g, or t
  misc_feature (34)..(34): n is a, c, g, or t
  misc_feature (144)..(144): n is a, c, g, or t
  misc_feature (276)..(276): n is a, c, g, or t
  misc_feature (317)..(317): n is a, c, g, or t
  misc_feature (432)..(432): n is a, c, g, or t
  misc_feature (494)..(495): n is a, c, g, or t
tttctggtgcangtntttattaaaatgctggccntttaaacatcctctgaattgtgtgaaatacttatttacttttgtgaaatgcgtttgtgaaaatctaggagtttctatgtaaggctgagcattttcaacattcctggcctntttgggagagagaatgcattctcttactggtcctcaggaaatatttatacaatacacttgggttctacttgctggtgtgtggagactcggctagcacccatgactggctgggctctagaaaacaagcatgcngtgctcctgtgccatctgggacccacgagacaaaagtctgntctcgggtgacgcttcctgccgagggtgatgaggactttgccaacagcctcacttgtctggaggggcccaaggaaagccgtgcccagatcttgctttgacctttaatatttgttnagtgtggcccgatagaatcccggtgtcttctctcacccgttccctgtcagcctttcctaagnnttttctctcaaggcaattggccgaaaattttaatgcctgctggccctggctcaagaattaaaccatcagaacatatccatt
